(19) United States
(12) Patent Application Publication
(10) Pub. No.: US 2024/0252643 A1
(43) Pub. Date: Aug. 1, 2024

(54) GUCY2C T CELL-ANTIGEN COUPLERS AND USES THEREOF

(71) Applicant: Triumvira Immunologics USA, Inc., Austin, TX (US)

(72) Inventors: Andreas Bader, Austin, TX (US); Christopher W. Helsen, Oakville (CA); Philbert Ip, Hamilton (CA); Tania Benatar, Thornhill (CA)

(21) Appl. No.: 18/577,219

(22) PCT Filed: Jun. 30, 2022
(86) PCT No.: PCT/US2022/035871

§ 371 Date: Jan. 5, 2024

Related U.S. Application Data
(60) Provisional application No. 63/261,930, filed on Sep. 30, 2021.
(60) Provisional application No. 63/203,106, filed on Jul. 8, 2021.

(51) Int. Cl. A61K 39/00; A61P 35/00; C07K 14/725; C07K 16/40

(52) U.S. Cl. CPC A61K 39/464454; A61K 39/4611; A61K 39/4632; A61P 35/00; C07K 14/7051; C07K 16/40; C07K 2317/569; C07K 2317/622; C07K 2319/30

(57) ABSTRACT

GUCY2C T cell antigen coupler (TAC) polypeptides having (i) an antigen-binding domain that binds GUCY2C, (ii) an antigen-binding domain that binds a protein associated with a TCR complex, and (iii) a T cell receptor signaling domain polypeptide are provided.

### CROSS-REFERENCE TO RELATED APPLICATIONS

[0001] This application claims the benefit of and priority to U.S. Provisional Patent Application No. 63/203,106, filed Jul. 8, 2021; and U.S. Provisional Patent Application No. 63/261,930, filed Sep. 30, 2021, the disclosures of each of which are hereby incorporated by reference in their entireties for all purposes.

### SEQUENCE LISTING

[0002] The instant application contains a Sequence Listing which has been submitted electronically in ASCII format and is hereby incorporated by reference in its entirety. Said ASCII copy, created on xxxx xx, 2022, is named xxxxxxxxx.txt and is ______ bytes in size.

### SUMMARY

[0003] Disclosed herein, in certain embodiments, are polynucleotides encoding a GUCY2C (Guanylate Cyclase 2C) T cell-antigen coupler (GUCY2C-TAC) polypeptide.

[0004] Disclosed herein, in certain embodiments, are Guanylate Cyclase 2C (GUCY2C) T cell-antigen coupler (GUCY2C-TAC) proteins, comprising: (a) a first polypeptide encoding an antigen-binding domain that binds GUCY2C; (b) a second polypeptide encoding an antigen-binding domain that binds a protein associated with a TCR complex; and (c) a third polypeptide encoding a TCR co-receptor cytosolic domain and transmembrane domain; wherein components encoded by (a), components encoded by (b), and components encoded by (c) are fused directly to each other, or joined by at least one linker. In some embodiments, the first polynucleotide, the second polynucleotide, and the third polynucleotide are in order. In some embodiments, the antigen-binding domain that binds GUCY2C is a designed ankyrin repeat (DARPin) polypeptide, single chain variable fragment (scFv), single domain antibody, diabody, affibody, adnectin, affilin, phylomer; fynomer, affimer, peptide aptamer, knottin, centyrin, anticalin, or nanobody. In some embodiments, the antigen-binding domain that binds GUCY2C is a designed ankyrin repeat (DARPin) polypeptide, a single chain variable fragment (scFv), or a nanobody. In some embodiments, the antigen-binding domain that binds GUCY2C is a nanobody. In some embodiments, the protein associated with the TCR complex is a CD3 protein. In some embodiments, the CD3 protein is a CD3γ protein, CD3δ protein and/or CD3ε protein. In some embodiments, the CD3 protein is a CD3ε protein. In some embodiments, the CD3 protein is a CD3ε protein. In some embodiments, the antigen-binding domain that binds the protein associated with the TCR complex is a designed ankyrin repeat (DARPin) polypeptide, single chain variable fragment (scFv), single domain antibody, diabody, affibody, adnectin, affilin, phylomer; fynomer, affimer, peptide aptamer, knottin, centyrin, anticalin, or nanobody. In some embodiments, the antigen-binding domain that binds the protein associated with the TCR complex is derived from an antibody selected from UCHT1 OKT3, F6A, and L2K. In some embodiments, the antigen-binding domain that binds the protein associated with the TCR complex is a UCHT1 antigen-binding domain. In some embodiments, the UCHT1 antigen-binding domain is an scFv of UCHT1. In some embodiments, the UCHT1 antigen-binding domain comprises a Y to T mutation at a position corresponding to amino acid 182 of SEQ ID NO: 32 (Y182T). In some embodiments, the UCHT1 antigen-binding domain comprises a humanized variant of UCHT1 (huUCHT1). In some embodiments, the UCHT1 antigen-binding domain comprises a humanized variant of UCHT1 comprising a Y to T mutation at a position corresponding to amino acid 177 of SEQ ID NO: 40 (huUCHT1 (Y177T)). In some embodiments, the antigen-binding domain that binds the protein associated with the TCR complex comprises an amino acid sequence having at least 80%, at least 85%, at least 90%, at least 95%, at least 96%, at least 97%, at least 98%, at least 99%, or 100% sequence identity with SEQ ID NO: 32 (UCHT1), SEQ ID NO: 44 (UCHT1 (Y182T)), SEQ ID NO: 40 (huUCHT1), or SEQ ID NO: 42 (huUCHT1 (Y177T)). In some embodiments, the CDR sequences of the antigen-binding domain that binds the protein associated with the TCR complex have 100% identity with the CDR sequences of the amino acid sequence of SEQ ID NO: 32 (UCHT1), SEQ ID NO: 44 (UCHT1 (Y182T)), SEQ ID NO: 40 (huUCHT1), or SEQ ID NO: 42 (huUCHT1 (Y177T)). In some embodiments, the CDR sequences of the antigen-binding domain that binds the protein associated with the TCR complex have 100% identity with the CDR sequences of the amino acid sequence of SEQ ID NO: 32 (UCHT1), SEQ ID NO: 44 (UCHT1 (Y182T)), SEQ ID NO: 40 (huUCHT1), or SEQ ID NO: 42 (huUCHT1 (Y177T)), and the non-CDR sequences of the antigen-binding domain that binds the protein associated with the TCR complex have at least 80%, at least 85%, at least 90%, at least 95%, at least 96%, at least 97%, at least 98%, or at least 99% sequence identity with the non-CDR sequences of the amino acid sequence of SEQ ID NO: 32 (UCHT1), SEQ ID NO: 44 (UCHT1 (Y182T)), SEQ ID NO: 40 (huUCHT1), or SEQ ID NO: 42 (huUCHT1 (Y177T)). In some embodiments, the antigen-binding domain that binds the protein associated with the TCR complex is an OKT3 antigen-binding domain. In some embodiments, the antigen-binding domain that binds the protein associated with the TCR complex comprises an amino acid sequence having at least 80%, at least 85%, at least 90%, at least 95%, at least 96%, at least 97%, at least 98%, at least 99%, or 100% sequence identity with SEQ ID NO: 34 (OKT3). In some embodiments, the CDR sequences of the antigen-binding domain that binds the protein associated with the TCR complex have 100% identity with the CDR sequences of the amino acid sequence of SEQ ID NO: 34 (OKT3). In some embodiments, the CDR sequences of the antigen-binding domain that binds the protein associated with the TCR complex have 100% identity with the CDR sequences of the amino acid sequence of SEQ ID NO: 34 (OKT3), and the non-CDR sequences of the antigen-binding domain that binds the protein associated with the TCR complex have at least 80%, at least 85%, at least 90%, at least 95%, at least 96%, at least 97%, at least 98%, or at least 99% sequence identity with the non-CDR sequences of the amino acid sequence of SEQ ID NO: 34 (OKT3). In some embodiments, the antigen-binding domain that binds the protein associated with the TCR complex is a F6A antigen-binding domain. In some embodiments, the antigen-binding domain that binds the protein associated with the TCR complex comprises an amino acid sequence having at least 80%, at least 85%, at least 90%, at least 95%, at least 96%, at least 97%, at least 98%, at least 99%, or 100% sequence identity with SEQ ID NO: 36 (F6A). In some embodiments, the CDR sequences of the antigen-binding domain that binds the protein associated with the TCR complex have 100% identity with the CDR sequences of the amino acid sequence of SEQ ID NO: 36 (F6A). In some embodiments, the CDR sequences of the antigen-binding domain that binds the protein associated with the TCR complex have 100% identity with the CDR sequences of the amino acid sequence of SEQ ID NO: 36 (F6A), and the non-CDR sequences of the antigen-binding domain that binds the protein associated with the TCR complex have at least 80%, at least 85%, at least 90%, at least 95%, at least 96%, at least 97%, at least 98%, or at least 99% sequence identity with the non-CDR sequences of the amino acid sequence of SEQ ID NO: 36 (F6A). In some embodiments, the antigen-binding domain that binds the protein associated with the TCR complex is a L2K antigen-binding domain. In some embodiments, the antigen-binding domain that binds the protein associated with the TCR complex comprises an amino acid sequence having at least 80%, at least 85%, at least 90%, at least 95%, at least 96%, at least 97%, at least 98%, at least 99%, or 100% sequence identity with SEQ ID NO: 38 (L2K). In some embodiments, the CDR sequences of the antigen-binding domain that binds the protein associated with the TCR complex have 100% identity with the CDR sequences of the amino acid sequence of SEQ ID NO: 38 (L2K). In some embodiments, the CDR sequences of the antigen-binding domain that binds the protein associated with the TCR complex have 100% identity with the CDR sequences of the amino acid sequence of SEQ ID NO: 38 (L2K), and the non-CDR sequences of the antigen-binding domain that binds the protein associated with the TCR complex have at least 80%, at least 85%, at least 90%, at least 95%, at least 96%, at least 97%, at least 98%, or at least 99% sequence identity with the non-CDR sequences of the amino acid sequence of SEQ ID NO: 38 (L2K). In some embodiments, the transmembrane domain is a CD4 transmembrane domain and the cytosolic domain is a CD4 cytosolic domain. In some embodiments, the transmembrane and cytosolic domain comprise an amino acid sequence having at least 80%, at least 85%, at least 90%, at least 95%, at least 96%, at least 97%, at least 98%, at least 99%, or 100% sequence identity with the amino acid sequence of SEQ ID NO: 46 (CD4 transmembrane and cytosolic domain). In some embodiments, the transmembrane domain is a CD8 transmembrane domain and the cytosolic domain is a CD8 cytosolic domain. In some embodiments, the component encoded by (a) and the component encoded by (c) are fused to the component encoded by (b). In some embodiments, the component encoded by (b) and the component encoded by (c) are fused to the component encoded by (a). In some embodiments, the at least one linker joins the component encoded by (a) to the component encoded by (b). In some embodiments, the at least one linker is a glycine and/or serine-rich linker, a large protein domain, a long helix structure, or a short helix structure. In some embodiments, at least one linker comprises an amino acid sequence having at least 80%, at least 85%, at least 90%, at least 95%, at least 96%, at least 97%, at least 98%, at least 99%, or 100% sequence identity with the amino acid sequence of SEQ ID NO: 26 ((G4S)4-based linker), SEQ ID NO: 28 (G4S-based linker), SEQ ID NO: 14 (CD4 based linker), SEQ ID NO: 12 (short helix connector), SEQ ID NO: 14 (long helix connector), SEQ ID NO: 16 (large domain connector), or SEQ ID NO: 24 ((G4S)3 flexible linker). In some embodiments, the GUYC2C antigen binding domain is selected from an amino acid sequence according to any one of SEQ ID NOs: 53-127 or 514-521. In some embodiments, the GUCY2C antigen-binding domain comprises a heavy chain variable region having an amino acid sequence having at least 80% sequence identity with an amino acid sequence according to any one of SEQ ID NOs: 128, 130, 132, 134, 136, 138, 140, 142, 144, 146, 148, 150, 152, 154, 156, 158, 160, 162, 164, 166, 168, 170, 172, 174, 176, 178, 180, 182, 184, 186, 188, 190, 192, 194, 196, 198, 200, and 202; and a light chain variable region having an amino acid sequence having at least 80% sequence identity with an amino acid sequence according to any one of SEQ ID NOs: 129, 131, 133, 135, 137, 139, 141, 143, 145, 147, 149, 151, 153, 155, 157, 159, 161, 163, 165, 167, 169, 171, 173, 175, 177, 179, 181, 183, 185, 187, 189, 191, 193, 195, 197, 199, 201, and 203. In some embodiments, the GUYC2C antigen binding domain comprises a heavy chain variable region having an amino acid sequence according to any one of SEQ ID NOs: 128, 130, 132, 134, 136, 138, 140, 142, 144, 146, 148, 150, 152, 154, 156, 158, 160, 162, 164, 166, 168, 170, 172, 174, 176, 178, 180, 182, 184, 186, 188, 190, 192, 194, 196, 198, 200, and 202; and a light chain variable region having an amino acid sequence according to any one of SEQ ID NOs: 129, 131, 133, 135, 137, 139, 141, 143, 145, 147, 149, 151, 153, 155, 157, 159, 161, 163, 165, 167, 169, 171, 173, 175, 177, 179, 181, 183, 185, 187, 189, 191, 193, 195, 197, 199, 201, and 203. In some embodiments, the GUCY2C antigen-binding domain comprises a heavy chain variable region comprising (a) a CDR1 having an amino acid selected from the group consisting of SEQ ID NO: 204, 210, 216, 222, 228, 234, 240, 246, 252, 258, 264, 270, 276, 282, 288, 294, 300, 306, 312, 318, 324, 330, 336, 342, 348, 354, 393, 399, 405, 411, 417, 423, 429, 435, 441, 447, 453, 459, 522, 525, 528, 531, 534, 537, 540, and 543, (b) a CDR2 having an amino acid selected from the group consisting of SEQ ID NO: 205, 211, 217, 223, 229, 235, 241, 247, 253, 259, 265, 271, 277, 283, 289, 295, 301, 307, 313, 319, 325, 331, 337, 343, 349, 355, 394, 400, 406, 412, 418, 424, 430, 436, 442, 448, 454 460, 523, 526, 529, 532, 535, 538, 541, and 544, and (c) a CDR3 having an amino acid selected from the group consisting of SEQ ID NO: 206, 212, 218, 224, 230, 236, 242, 248, 254, 260, 266, 272, 278, 284, 290, 296, 302, 308, 314, 320, 326, 332, 338, 344, 350, 356, 395, 401, 407, 413, 419, 425, 431, 437, 443, 449, 455, 461, 524, 527, 530, 533, 536, 539, 542, and 545; and a light chain variable region comprising (a) a CDR1 having an amino acid selected from the group consisting of SEQ ID NO: 207, 213, 219, 225, 231, 237, 243, 249, 255, 261, 267, 273, 279, 285, 291, 297, 303, 309, 315, 321, 327, 333, 339, 345, 351, 357, 396, 402, 408, 414, 420, 426, 432, 438, 444, 450, 456 and 462, (b) a CDR2 having an amino acid selected from the group consisting of SEQ ID NO: 208, 214, 220, 226, 232, 238, 244, 250, 256, 262, 268, 274, 280, 286, 292, 298, 304, 310, 316, 322, 328, 334, 340, 346, 352, 358, 397, 403, 409, 415, 421, 427, 433, 439, 445, 451, 457 and 463, and (c) a CDR3 having an amino acid selected from the group consisting of SEQ ID NO: 209, 215, 221, 227, 233, 239, 245, 251, 257, 263, 269, 275, 281, 287, 293, 299, 305, 311, 317, 323, 329, 335, 341, 347, 353, 359, 398, 404, 410, 416, 422, 428, 434, 440, 446, 452, 458 and 464. In some embodiments, the GUCY2C antigen-binding domain is a nanobody and comprises (a) a VHH CDR1 having an amino acid selected from the group consisting of SEQ ID NO: 360, 363, 366, 369, 372, 375, 378, 381, 384, 387, and 390; (b) a VHH CDR2 having an amino acid selected from the group consisting of SEQ ID NO: 361, 364, 367, 370, 373, 376, 379, 382, 385, 388, and 391; and (c) a VHH CDR3 having an amino acid selected from the group consisting of SEQ ID NO: 362, 365, 368, 371, 374, 377, 380, 383, 386, 389, and 392. In some embodiments, the GUCY2C-TAC protein does not comprise a co-stimulatory domain. In some embodiments, the GUCY2C-TAC protein does not comprise an activation domain. In some embodiments, the GUCY2C-TAC protein further comprises a leader sequence. In some embodiments, the leader sequence comprises an amino acid sequence having at least 80%, at least 85%, at least 90%, at least 95%, at least 96%, at least 97%, at least 98%, at least 99%, or 100% sequence identity with the amino acid sequence of SEQ ID NO: 2 (muIgG leader), SEQ ID NO: 18 (huIgG leader), SEQ ID NO: 20 (huCD8a-1 leader) or SEQ ID NO: 30 (huCD8a-2 leader).

[0005] Disclosed herein, in certain embodiments, are GUCY2C TAC proteins comprising an amino acid sequence having at least 80% sequence identity with the amino acid sequence of any one of SEQ ID NOs: 465-513, 546-590, or 686.

[0006] Disclosed herein, in certain embodiments, are GUCY2C TAC protein comprising an amino acid sequence of any one of SEQ ID NOs: 465-513, 546-590, or 686.

[0007] Disclosed herein, in certain embodiments, are nucleic acid sequences encoding a GUCY2C-TAC protein described herein. In some embodiments, the nucleic acid sequence has at least 80% sequence identity with the nucleic acid sequence of any one of SEQ ID NOs: 591-685. In some embodiments, the nucleic acid sequence comprises the nucleic acid sequence of any one of SEQ ID NOs: 591-685.

[0008] Disclosed herein, in certain embodiments, are T cells expressing a GUCY2C-TAC protein described herein. Disclosed herein, in certain embodiments, are T cells comprising a nucleic acid described herein.

[0009] Disclosed herein, in certain embodiments, are pharmaceutical compositions comprising a T cell described herein, and a pharmaceutically acceptable excipient.

[0010] Disclosed herein, in certain embodiments, are method of treating a GUCY2C-expressing cancer in an individual in need thereof, comprising administering to the individual a pharmaceutical composition described herein. In some embodiments, the cancer is a solid cancer. In some embodiments, the cancer is a primary colorectal cancer, a primary gastric cancer, a primary gastroesophageal junction cancer, a primary esophageal cancer, or a primary pancreatic cancer. In some embodiments, the cancer is a metastatic colorectal cancer, a metastatic gastric cancer, a metastatic gastroesophageal junction cancer, a metastatic esphageal cancer, or a metastatic pancreatic cancer.

### BRIEF DESCRIPTION OF THE DRAWINGS

[0011] The invention can be more completely understood with reference to the following drawings.

[0012] FIG. 1 depicts a graph showing surface expression level of indicated GUCY2C-TACs as measured by flow cytometry.

[0013] FIGS. 2A-2B depict graphs showing activation of T cells expressing the indicated TACs as measured by up-regulation of CD69 following co-culture with NALM6^{GUCY2C} (FIG. 2A) or N87^{GUCY2C} (FIG. 2B) target cells.

[0014] FIGS. 3A-3B depict a cell trace assay. FIG. 3A depicts the normalized division indices of T cells expressing the indicated TACs following co-culture with NALM6^{GUCY2C} target cells.

[0015] FIG. 3B depicts representative graphs of cell trace violet (CTV) staining of T cells expressing indicated TACs from FIG. 3A.

[0016] FIG. 4 depicts a graph showing cytotoxicity of NALM6^{GUCY2C-GFP} target cells following co-culture with T cells expressing indicated TACs.

[0017] FIG. 5 depicts a graph showing activation of T cells expressing the indicated TACs as measured by up-regulation of CD69 following co-culture with indicated target cells.

[0018] FIG. 6 depicts a graph showing the normalized division indices of T cells expressing the indicated TACs following co-culture with indicated target cells.

[0019] FIG. 7 depicts the relative cell counts of target NALM6^{GUCY2C-GFPeLuc} cells as measured by detection of fluorescence signal from target cells following co-culture with T cells expressing indicated TACs at indicated effector:target (E:T) ratios.

[0020] FIGS. 8A-8B depict results of an assay measuring activation of GUCY2C-TAC T cells against cell lines with varying expression of GUCY2C. FIG. 8A depicts graphs showing relative GUCY2C expression (horizontal axes) with cell counts shown on the vertical axes. FIG. 8B depicts a graph showing activation of T cells expressing the indicated TACs as measured by up-regulation of CD69 following co-culture with indicated target cells.

### DETAILED DESCRIPTION

[0021] Cancer is a major health challenge. According to the American Cancer Society, more than one million people in the United States are diagnosed with cancer each year. While patients with early stage disease are sometimes treated effectively by conventional therapies (surgery, radiation, chemotherapy), few options are available to patients with advanced disease, and those options are typically palliative in nature.

[0022] Active immunotherapy seeks to employ the patient's immune system to clear tumors and offers an option to patients who have failed conventional therapies. Generally, this treatment involves infusing patients with large numbers of tumor-specific T cells. To this point, most engineered T cell therapies involving genetic modification of the T cells yield: (i) forced expression of T cell receptor (TCR); or (ii) a chimeric antigen receptor (CAR) specific for antigen targets on the tumor. To date, the chimeric antigen receptors used for engineering T cells consist of: (i) a targeting domain, usually a single-chain fragment variable (scFv); (ii) a transmembrane domain; and (iii) a cytosolic domain that contains signaling elements from the T cell receptor and associated proteins. Such chimeric antigen receptors have also been referred to as “T-body” or “Chimeric Immune Receptor” (CIR), but currently, most researchers use the term “CAR”. One advantage of the CAR approach is that it allows any patient's immune cells to be targeted against any desirable target in a major histocompatibility complex (MHC) independent manner. This is appealing as MHC presentation is often defective in tumor cells.

[0023] CARs are considered in modular terms and scientists have spent considerable time investigating the influence of different cytoplasmic signaling domains on CAR function. Conventional CARs generally share two main components: (i) the CD3 zeta cytoplasmic domain, which contains immunotyrosine activation motifs (ITAMs) critical for T cell activation; and (ii) components of costimulatory receptors that trigger important survival pathways such as the Akt pathway.

[0024] The first-generation CARs employed a single signaling domain from either CD3ζ or FcεRIγ. Second-generation CARs combined the signaling domain of CD3ζ with the cytoplasmic domain of costimulatory receptors from either the CD28 or TNFR family of receptors. Most CAR-engineered T cells that are currently being tested in the clinic employ second-generation CARs where CD3ζ is coupled to the cytoplasmic domain of either CD28 or CD137. These second generation CARs have demonstrated anti-tumor activity in CD19-positive tumors. Third-generation CARs combined multiple costimulatory domains, but there is concern that third-generation CARs may lose antigen-specificity.

[0025] While CAR-engineered T cells have shown considerable promise in clinical application, they rely on a synthetic method for replacing the native activation signal that is provided by the T cell receptor (TCR). Since this synthetic receptor does not deliver all of the signaling components associated with the TCR (ex. ITAMs on CD3γ, CD3δ, CD3ε), it remains unclear whether the T cells are optimally activated by the CAR or how the CAR activation affects T cell differentiation (ex. progression to memory). Furthermore, since the CAR signaling domains are disconnected from their natural regulatory partners by the very nature of the CAR structure, there is an inherent risk that CARs may lead to a low-level of constitutive activation, which could result in off-target toxicities. Therefore, the synthetic nature of the prototypic CAR may disrupt canonical mechanisms that limit TCR activation, and may underpin the severe toxicity often associated with therapeutic doses of conventional CAR T cells.

[0026] Given these limitations, it is preferable to re-direct T cells to attack tumors via their natural TCR. An alternate chimeric receptor, termed a T cell Antigen Coupler (TAC or TAC) receptor, has been developed which employs a distinct biology to direct the T cell to attack tumors. While the CAR is a fully synthetic receptor that stitches together components of T cell receptor (TCR) signaling complex, the TAC receptor re-directs the TCR towards tumor targets and recapitulates the native TCR signaling structure. For example, in some embodiments, the TACs disclosed herein activate natural Major Histocompatibility complex (MHC) signaling through the T cell receptor (TCR), while retaining MHC-unrestricted targeting. Further, the TACs disclosed herein recruit the T Cell Receptor (TCR) in combination with co-receptor stimulation. Moreover, in some embodiments, TACs disclosed herein show enhanced activity and safety.

### Certain Terminology

[0027] The term “antigen-binding domain,” refers to any substance or molecule that binds, directly or indirectly, to a target (e.g., GUCY2C). Antigen-binding domains include antibodies or fragments thereof, peptides, peptidomimetics, proteins, glycoproteins, proteoglycans, carbohydrates, lipids, nucleic acids, or small molecules that bind to a target.

[0028] As used herein, unless otherwise indicated, the term “antibody” is understood to mean an intact antibody (e.g., an intact monoclonal antibody), or a fragment thereof, such as a Fc fragment of an antibody (e.g., an Fc fragment of a monoclonal antibody), or an antigen-binding fragment of an antibody (e.g., an antigen-binding fragment of a monoclonal antibody), including an intact antibody, antigen-binding fragment, or Fc fragment that has been modified, engineered, or chemically conjugated. In general, antibodies are multimeric proteins that contain four polypeptide chains. Two of the polypeptide chains are called immunoglobulin heavy chains (H chains), and two of the polypeptide chains are called immunoglobulin light chains (L chains). The immunoglobulin heavy and light chains are connected by an interchain disulfide bond. The immunoglobulin heavy chains are connected by interchain disulfide bonds. A light chain consists of one variable region (V_{L}) and one constant region (C_{L}). The heavy chain consists of one variable region (V_{H}) and at least three constant regions (CH₁, CH₂ and CH₃). The variable regions determine the binding specificity of the antibody. Each variable region contains three hypervariable regions known as complementarity determining regions (CDRs) flanked by four relatively conserved regions known as framework regions (FRs). The extent of the FRs and CDRs has been defined (Kabat, E. A., et al. (1991) SEQUENCES OF PROTEINS OF IMMUNOLOGICAL INTEREST, FIFTH EDITION, U.S. Department of Health and Human Services, NIH Publication No. 91-3242; and Chothia, C. et al. (1987) J. MOL. BIOL. 196:901-917). CDRs can also be identified by alignment of the amino acid sequences. FRs contain conserved amino acid sequences, thus CDR sequences can be identified by identification of non-conserved amino acid residues between variable regions with conserved FRs. The three CDRs, referred to as CDR₁, CDR₂, and CDR₃, contribute to the antibody binding specificity. Naturally occurring antibodies have been used as starting material for engineered antibodies, such as chimeric antibodies and humanized antibodies. Examples of antibody-based antigen-binding fragments include Fab, Fab′, (Fab′)₂, Fv, single chain antibodies (e.g., scFv), minibodies, and diabodies. Examples of antibodies that have been modified or engineered include chimeric antibodies, humanized antibodies, and multispecific antibodies (e.g., bispecific antibodies). An example of a chemically conjugated antibody is an antibody conjugated to a toxin moiety.

[0029] The term “T cell” as used herein refers to a type of lymphocyte that plays a central role in cell-mediated immunity. T cells, also referred to as T lymphocytes, are distinguished from other lymphocytes, such as B cells and natural killer cells, by the presence of a T-cell receptor (TCR) on the cell surface. There are several subsets of T cells with distinct functions, including but not limited to, T helper cells, cytotoxic T cells, memory T cells, regulatory T cells and natural killer T cells.

[0030] The term “γδ T cell” or “gamma delta T cell” or “gd T cell” as used herein refers to any lymphocyte having a γδ T cell receptor (TCR) on its surface, including one γ-chain and one δ-chain.

[0031] The term “T cell antigen coupler” or TAC is used interchangeably with “trifunctional T cell antigen coupler” or Tri-TAC and refers to an engineered nucleic acid construct or polypeptide comprising (a) an antigen-binding domain that binds a target, (b) an antigen-binding domain that binds a protein associated with a T cell receptor (TCR) complex, and (c) a T cell receptor signaling domain.

[0032] The term “polynucleotide” and/or “nucleic acid sequence” and/or “nucleic acid” as used herein refers to a sequence of nucleoside or nucleotide monomers consisting of bases, sugars and intersugar (backbone) linkages. The term also includes modified or substituted sequences comprising non-naturally occurring monomers or portions thereof. The nucleic acid sequences of the present application may be deoxyribonucleic acid sequences (DNA) or ribonucleic acid sequences (RNA) and may include naturally occurring bases including adenine, guanine, cytosine, thymidine and uracil. The sequences may also contain modified bases. Examples of such modified bases include aza and deaza adenine, guanine, cytosine, thymidine and uracil; and xanthine and hypoxanthine. The nucleic acids of the present disclosure may be isolated from biological organisms, formed by laboratory methods of genetic recombination or obtained by chemical synthesis or other known protocols for creating nucleic acids.

[0033] The term “isolated polynucleotide” or “isolated nucleic acid sequence” as used herein refers to a nucleic acid substantially free of cellular material or culture medium when produced by recombinant DNA techniques, or chemical precursors, or other chemicals when chemically synthesized. An isolated nucleic acid is also substantially free of sequences which naturally flank the nucleic acid (i.e., sequences located at the 5′ and 3′ ends of the nucleic acid) from which the nucleic acid is derived. The term “nucleic acid” is intended to include DNA and RNA and is either double stranded or single stranded, and represents the sense or antisense strand. Further, the term “nucleic acid” includes the complementary nucleic acid sequences.

[0034] The term “recombinant nucleic acid” or “engineered nucleic acid” as used herein refers to a nucleic acid or polynucleotide that is not found in a biological organism. For example, recombinant nucleic acids may be formed by laboratory methods of genetic recombination (such as molecular cloning) to create sequences that would not otherwise be found in nature. Recombinant nucleic acids may also be created by chemical synthesis or other known protocols for creating nucleic acids.

[0035] The terms “peptide”, “polypeptide,” and “protein” as used herein mean a chain of amino acids. The term protein as used herein further means a large molecule comprising one or more chains of amino acids and, in some embodiments, is a fragment or domain of a protein or a full length protein. Furthermore, as used herein, the term protein either refers to a linear chain of amino acids or to a chain of amino acids that has been processed and folded into a functional protein. The protein structure is divided into four distinct levels: (1) primary structure—referring to the sequence of amino acids in the polypeptide chain, (2) secondary structure—referring to the regular local sub-structures on the polypeptide backbone chain, such as α-helix and β-sheets, (3) tertiary structure—referring to the three-dimensional structure if monomeric and multimeric protein molecules, and (4) quaternary structure—referring to the three-dimensional structure comprising the aggregation of two or more individual polypeptide chains that operate as a single functional unit. The use of peptide or polypeptide herein does not mean that the chain of amino acids is not also a protein (i.e., a chain of amino acids having a secondary, tertiary or quaternary structure).

[0036] The term “isolated polypeptide” refers to a polypeptide substantially free of cellular material or culture medium when produced by recombinant DNA techniques, or chemical precursors or other chemicals when chemically synthesized.

[0037] The term “vector” as used herein refers to a polynucleotide that is used to deliver a nucleic acid to the inside of a cell. In some embodiments, a vector is an expression vector comprising expression control sequences (for example, a promoter) operatively linked to a nucleic acid to be expressed in a cell. Vectors known in the art include, but are not limited to, plasmids, phages, cosmids and viruses.

[0038] The term “tumor antigen” or “tumor associated antigen” as used herein refers to an antigenic substance produced in tumor cells that triggers an immune response in a host (e.g., which is presented by MHC complexes). In some embodiments, a tumor antigen is on the surface of a tumor cell.

[0039] As used herein, the term “transmembrane and cytosolic domain” refers to a polypeptide that comprises a transmembrane domain and a cytosolic domain of a protein associated with the T cell receptor (TCR) complex. In some embodiments, such transmembrane and cytosolic domain may include, but is not limited to, protein domains that (a) associate with the lipid raft and/or (b) bind Lck.

[0040] A “TCR co-receptor” as used herein, refers to a molecule that assists the T cell receptor (TCR) in communicating with an antigen-presenting cell and may be considered part of the first signal that leads to the activation of the TCR. Examples of TCR co-receptors include, but are not limited to, CD4, LAG3, and CD8.

[0041] A “TCR co-stimulator” or “co-stimulatory domain” as used herein, refers to a molecule that enhances the response of a T cell to an antigen and may be considered as the second signal that leads to the activation of the TCR. Examples of TCR co-stimulators include, but are not limited to, ICOS, CD27, CD28, 4-1BB (CD 137), OX40 (CD134), CD30, CD40, lymphocyte fiction-associated antigen 1 (LFA-1), CD2, CD7, LIGHT, NKG2C, B7-H3, and a ligand that specifically binds CD83.

[0042] The terms “recipient”, “individual”, “subject”, “host”, and “patient”, are used interchangeably herein and in some embodiments, refer to any mammalian subject for whom diagnosis, treatment, or therapy is desired, particularly humans. “Mammal” for purposes of treatment refers to any animal classified as a mammal, including humans, domestic and farm animals, and laboratory, zoo, sports, or pet animals, such as dogs, horses, cats, cows, sheep, goats, pigs, mice, rats, rabbits, guinea pigs, monkeys etc. In some embodiments, the mammal is human. None of these terms require the supervision of medical personnel.

[0043] As used herein, the terms “treatment,” “treating,” and the like, in some embodiments, refer to administering an agent, or carrying out a procedure, for the purposes of obtaining an effect. The effect may be prophylactic in terms of completely or partially preventing a disease or symptom thereof and/or may be therapeutic in terms of affecting a partial or complete cure for a disease and/or symptoms of the disease. “Treatment,” as used herein, may include treatment of a disease or disorder (e.g., cancer) in a mammal, particularly in a human, and includes: (a) preventing the disease or a symptom of a disease from occurring in a subject which may be predisposed to the disease but has not yet been diagnosed as having it (e.g., including diseases that may be associated with or caused by a primary disease; (b) inhibiting the disease, i.e., arresting its development; and (c) relieving the disease, i.e., causing regression of the disease. Treating may refer to any indicia of success in the treatment or amelioration or prevention of a cancer, including any objective or subjective parameter such as abatement; remission; diminishing of symptoms; or making the disease condition more tolerable to the patient; slowing in the rate of degeneration or decline; or making the final point of degeneration less debilitating. The treatment or amelioration of symptoms is based on one or more objective or subjective parameters; including the results of an examination by a physician. Accordingly, the term “treating” includes the administration of the compounds or agents of the present invention to prevent, delay, alleviate, arrest or inhibit development of the symptoms or conditions associated with diseases (e.g., cancer). The term “therapeutic effect” refers to the reduction, elimination, or prevention of the disease, symptoms of the disease, or side effects of the disease in the subject.

[0044] As used herein, singular forms “a”, “and,” and “the” include plural referents unless the context clearly indicates otherwise. Thus, for example, reference to “an antibody” includes a plurality of antibodies and reference to “an antibody” in some embodiments includes multiple antibodies, and so forth.

[0045] As used herein, all numerical values or numerical ranges include whole integers within or encompassing such ranges and fractions of the values or the integers within or encompassing ranges unless the context clearly indicates otherwise. Thus, for example, reference to a range of 90-100%, includes 91%, 92%, 93%, 94%, 95%, 95%, 96%, 97%, etc., as well as 91.1%, 91.2%, 91.3%, 91.4%, 91.5%, etc., 92.1%, 92.2%, 92.3%, 92.4%, 92.5%, etc., and so forth. In another example, reference to a range of 1-5,000 fold includes 1, 2, 3, 4, 5, 6, 7, 8, 9, 10, 11, 12, 13, 14, 15, 16, 17, 18, 19, 20, fold, etc., as well as 1.1, 1.2, 1.3, 1.4, 1.5, fold, etc., 2.1, 2.2, 2.3, 2.4, 2.5, fold, etc., and so forth.

[0046] “About” a number, as used herein, refers to range including the number and ranging from 10% below that number to 10% above that number. “About” a range refers to 10% below the lower limit of the range, spanning to 10% above the upper limit of the range.

[0047] “Percent (%) identity” refers to the extent to which two sequences (nucleotide or amino acid) have the same residue at the same positions in an alignment. For example, “an amino acid sequence is X % identical to SEQ ID NO: Y” refers to % identity of the amino acid sequence to SEQ ID NO: Y and is elaborated as X % of residues in the amino acid sequence are identical to the residues of sequence disclosed in SEQ ID NO: Y. Generally, computer programs are employed for such calculations. Exemplary programs that compare and align pairs of sequences, include ALIGN (Myers and Miller, 1988), FASTA (Pearson and Lipman, 1988; Pearson, 1990) and gapped BLAST (Altschul et al., 1997), BLASTP, BLASTN, or GCG (Devereux et al., 1984).

[0048] As used herein, the term “selective binding” refers to the higher affinity with which a molecule (e.g., protein such as an antigen-binding domain of TAC) binds its target molecule (e.g., target antigen such as GUCY2C) over other molecules. Unless indicated otherwise, the terms “selective binding” and “specific binding” are used interchangeably herein.

[0049] As used herein, the term GUCY2C means the enzyme Guanylate Cyclase 2C. GUCY2C is a transmembrane protein that functions as a receptor for endogenous peptides guanylin and uroguanylin, and the heat-stable E. coli enterotoxin. The encoded protein activates the cystic fibrosis transmembrane conductance regulator. GUCY2C produces the cGMP following activation by the binding of guanylin or uroguanylin, regulating intestinal homeostasis, tumorigenesis, and obesity. Cell surface expression of GUCY2C is found on luminal surfaces of the intestinal epithelium and certain hypothalamic neurons. Over-expression of GUCY2C is found in tumors that evolve from intestinal metaplasia, including colorectal, esophageal, gastric, and pancreatic cancers. Over-expression is maintained in >95% of colorectal cancer metastases.

### T Cell Antigen Couplers (TACs)

[0050] Disclosed herein, in certain embodiments, are nucleic acids encoding GUCY2C T cell-antigen coupler (TAC) polypeptides. In some embodiments, the nucleic acids encoding the GUCY2C TAC comprise: (a) a first polynucleotide encoding an antigen-binding domain that binds GUCY2C; (b) a second polynucleotide encoding an antigen-binding domain that binds the TCR complex; and (c) a third polynucleotide encoding a transmembrane domain and cytosolic domain. In some embodiments, the nucleic acids comprise, in order (e.g., from 5′ to 3′): (a) the first polynucleotide; (b) the second polynucleotide; and (c) the third polynucleotide encoding a TCR co-receptor cytosolic domain and transmembrane domain. In some embodiments, the nucleic acids encoding the GUCY2C TAC do not encode a co-stimulatory domain. In some embodiments, the nucleic acids encoding the GUCY2C TAC do not encode a co-activation domain.

[0051] Further disclosed herein, in certain embodiments, are GUCY2C T cell-antigen coupler (TAC) polypeptides. In some embodiments, the GUCY2C TAC polypeptides comprise: (a) an antigen-binding domain that binds GUCY2C; (b) an antigen-binding domain that binds the TCR complex; and (c) a transmembrane domain and cytosolic domain. In some embodiments, the GUCY2C TAC polypeptides comprise, in order (e.g., from N-terminus to C-terminus) (a) the antigen-binding domain that binds GUCY2C; (b) the antigen-binding domain that binds the TCR complex; and (c) the transmembrane domain and cytosolic domain. In some embodiments, the GUCY2C TAC polypeptides do not include a co-stimulatory domain. In some embodiments, the GUCY2C TAC polypeptides do not include a co-activation domain.

[0052] Further disclosed herein, in certain embodiments, are expression vectors comprising a nucleic acid encoding a GUCY2C TAC polypeptide as described herein.

[0053] Further disclosed herein, in certain embodiments, are T cells comprising a nucleic acid encoding a GUCY2C TAC polypeptide as described herein, T cells comprising an expression vector encoding a GUCY2C TAC polypeptide as described herein, or T cells comprising a GUCY2C TAC polypeptide as described herein.

[0054] Further disclosed herein, in certain embodiments, are methods of treating a cancer in an individual in need thereof, comprising administering to the individual a T cell comprising a GUCY2C T cell-antigen coupler (TAC) polypeptide as described herein.

### TCR Complex Protein Antigen-Binding Domain

[0055] In certain embodiments, the GUCY2C TAC comprises an antigen-binding domain that binds a protein associated with the TCR complex. A “TCR complex protein antigen-binding domain,” also referred to as a “TCR complex antigen-binding domain,” “antigen-binding domain that binds the TCR complex,” or “antigen-binding domain that binds a protein associated with the TCR complex,” refers to any substance or molecule that binds, directly or indirectly, to a protein associated with a TCR complex. In some embodiments, the antigen-binding domain that binds a protein associated with a TCR complex selectively binds to a protein of the TCR. In some embodiments, the antigen-binding domain that binds a protein associated with a TCR complex comprises a substance that specifically binds to a protein of the TCR.

[0056] In some embodiments, the TCR complex protein antigen-binding domain is selected from antibodies or fragments thereof, for example, single chain antibodies (e.g., single-chain fragment variable antibodies (scFvs)), single domain antibodies (e.g., heavy-chain-only antibodies (VHH), shark heavy-chain-only antibodies (VNAR)), nanobodies, diabodies, minibodies, Fab fragments, Fab′ fragments, F(ab′)₂ fragments, or Fv fragments that bind to a protein of the TCR. In some embodiments, the TCR complex protein antigen-binding domain is selected from ankyrin repeat proteins (DARPins), affibodies, adnectins, affilins, phylomers; fynomers, affimers, peptide aptamers, lectins, knottins, centyrins, anticalins, peptides, peptidomimetics, proteins, glycoproteins, or proteoglycans that bind to a protein of the TCR, or naturally occurring ligands for a protein of the TCR. In some embodiments, the TCR complex protein antigen-binding domain is a non-protein compound that binds to a protein of the TCR, including but not limited to carbohydrates, lipids, nucleic acids, or small molecules. In some embodiments, the TCR complex protein antigen-binding domain is a designed ankyrin repeat (DARPin) targeted to a protein of the TCR. In some embodiments, the TCR complex protein antigen-binding domain is a single-chain variable fragment (scFv) targeted to a protein of the TCR. In some embodiments, the TCR complex protein antigen-binding domain is a nanobody targeted to a protein of the TCR.

[0057] Proteins associated with the TCR include, but are not limited, to the TCR alpha (a) chain, TCR beta (β) chain, TCR gamma (γ) chain, TCR delta (δ) chain, CD3γ chain, CD3δ chain and CD3ε chains. In some embodiments, an antigen-binding domain that binds a protein associated with the TCR complex is an antibody to the TCR alpha (α) chain, TCR beta (β) chain, TCR gamma (γ) chain, TCR delta (δ) chain, CD3γ chain, CD3δ chain and/or CD3ε chain. In some embodiments, the protein associated with a TCR complex is CD3. In some embodiments, the protein associated with a TCR complex is CD3ε. In some embodiments, the antigen-binding domain that binds CD3 is an antibody, for example, a single chain antibody, for example a single-chain variable fragment (scFv). Examples of CD3 antibodies, include, but are not limited to, UCHT1, OKT3, F6A, L2K, muromonab, otelixizumab, teplizumab, visilizumab, CD3-12, MEM-57, 4D10A6, CD3D, or TR66.

[0058] In some embodiments, the antigen-binding domain that binds the TCR complex is UCHT1, or a variant thereof. In some embodiments, the UCHT1 antigen-binding domain is encoded by SEQ ID NO: 31. In some embodiments, the UCHT1 antigen-binding domain comprises SEQ ID NO: 32. In some embodiments, the UCHT1 antigen-binding domain is mutated. In some embodiments, the UCHT1 antigen-binding domain comprises a Y to T mutation at a position corresponding to amino acid 182 of SEQ ID NO: 32 (Y182T). In some embodiments, the UCHT1 (Y182T) antigen-binding domain is encoded by SEQ ID NO: 43. In some embodiments, the UCHT1 (Y182T) antigen-binding domain comprises SEQ ID NO: 44. In some embodiments, the antigen-binding domain that binds the TCR complex is a humanized UCHT1 (huUCHT1). In some embodiments, the huUCHT1 antigen-binding domain is encoded by SEQ ID NO: 39. In some embodiments, the huUCHT1 antigen-binding domain comprises SEQ ID NO: 40. In some embodiments, the huUCHT1 has a Y to T mutation at a position corresponding to amino acid 177 of SEQ ID NO: 40 (Y177T). In some embodiments, the huUCHT1 (Y177T) antigen-binding domain is encoded by SEQ ID NO: 41. In some embodiments, the huUCHT1 antigen-binding domain comprises SEQ ID NO: 42.

[0059] In some embodiments, the polynucleotide encoding the antigen-binding domain that binds the protein associated with the TCR complex comprises a nucleotide sequence having at least 70% sequence identity with the nucleotide sequence of SEQ ID NO: 31 (UCHT1). In some embodiments, the polynucleotide encoding the antigen-binding domain that binds the protein associated with the TCR complex comprises a nucleotide sequence having at least 75% sequence identity with the nucleotide sequence of SEQ ID NO: 31 (UCHT1). In some embodiments, the polynucleotide encoding the antigen-binding domain that binds the protein associated with the TCR complex comprises a nucleotide sequence having at least 80% sequence identity with the nucleotide sequence of SEQ ID NO: 31 (UCHT1). In some embodiments, the polynucleotide encoding the antigen-binding domain that binds the protein associated with the TCR complex comprises a nucleotide sequence having at least 85% sequence identity with the nucleotide sequence of SEQ ID NO: 31 (UCHT1). In some embodiments, the polynucleotide encoding the antigen-binding domain that binds the protein associated with the TCR complex comprises a nucleotide sequence having at least 90% sequence identity with the nucleotide sequence of SEQ ID NO: 31 (UCHT1). In some embodiments, the polynucleotide encoding the antigen-binding domain that binds the protein associated with the TCR complex comprises a nucleotide sequence having at least 95% sequence identity with the nucleotide sequence of SEQ ID NO: 31 (UCHT1). In some embodiments, the polynucleotide encoding the antigen-binding domain that binds the protein associated with the TCR complex comprises a nucleotide sequence having at least 96% sequence identity with the nucleotide sequence of SEQ ID NO: 31 (UCHT1). In some embodiments, the polynucleotide encoding the antigen-binding domain that binds the protein associated with the TCR complex comprises a nucleotide sequence having at least 97% sequence identity with the nucleotide sequence of SEQ ID NO: 31 (UCHT1). In some embodiments, the polynucleotide encoding the antigen-binding domain that binds the protein associated with the TCR complex comprises a nucleotide sequence having at least 98% sequence identity with the nucleotide sequence of SEQ ID NO: 31 (UCHT1). In some embodiments, the polynucleotide encoding the antigen-binding domain that binds the protein associated with the TCR complex comprises a nucleotide sequence having at least 99% sequence identity with the nucleotide sequence of SEQ ID NO: 31 (UCHT1). In some embodiments, the polynucleotide encoding the antigen-binding domain that binds the protein associated with the TCR complex comprises the nucleotide sequence of SEQ ID NO: 31 (UCHT1).

[0060] In some embodiments, the antigen-binding domain that binds the protein associated with the TCR complex comprises an amino acid sequence having at least 70% sequence identity with the amino acid sequence of SEQ ID NO: 32 (UCHT1). In some embodiments, the antigen-binding domain that binds the protein associated with the TCR complex comprises an amino acid sequence having at least 75% sequence identity with the amino acid sequence of SEQ ID NO: 32 (UCHT1). In some embodiments, the antigen-binding domain that binds the protein associated with the TCR complex comprises an amino acid sequence having at least 80% sequence identity with the amino acid sequence of SEQ ID NO: 32 (UCHT1). In some embodiments, the antigen-binding domain that binds the protein associated with the TCR complex comprises an amino acid sequence having at least 85% sequence identity with the amino acid sequence of SEQ ID NO: 32 (UCHT1). In some embodiments, the antigen-binding domain that binds the protein associated with the TCR complex comprises an amino acid sequence having at least 90% sequence identity with the amino acid sequence of SEQ ID NO: 32 (UCHT1). In some embodiments, the antigen-binding domain that binds the protein associated with the TCR complex comprises an amino acid sequence having at least 95% sequence identity with the amino acid sequence of SEQ ID NO: 32 (UCHT1). In some embodiments, the antigen-binding domain that binds the protein associated with the TCR complex comprises an amino acid sequence having at least 96% sequence identity with the amino acid sequence of SEQ ID NO: 32 (UCHT1). In some embodiments, the antigen-binding domain that binds the protein associated with the TCR complex comprises an amino acid sequence having at least 97% sequence identity with the amino acid sequence of SEQ ID NO: 32 (UCHT1). In some embodiments, the antigen-binding domain that binds the protein associated with the TCR complex comprises an amino acid sequence having at least 98% sequence identity with the amino acid sequence of SEQ ID NO: 32 (UCHT1). In some embodiments, the antigen-binding domain that binds the protein associated with the TCR complex comprises an amino acid sequence having at least 99% sequence identity with the amino acid sequence of SEQ ID NO: 32 (UCHT1). In some embodiments, the antigen-binding domain that binds the protein associated with the TCR complex comprises the amino acid sequence of SEQ ID NO: 32 (UCHT1). In some embodiments, the CDR sequences of the antigen-binding domain that binds the protein associated with the TCR complex have 100% identity with the CDR sequences of the amino acid sequence of SEQ ID NO: 32 (UCHT1) (i.e., the antigen-binding domain that binds the protein associated with the TCR complex comprises an amino acid sequence comprising a CDRH1, CDRH2, CDRH3, CDRL1, CDRL2, and CDRL3, each having 100% identity to the corresponding CDR in the amino acid sequence of SEQ ID NO: 32 (UCHT1). In some embodiments, the CDR sequences of the antigen-binding domain that binds the protein associated with the TCR complex have 100% identity with the CDR sequences of the amino acid sequence of SEQ ID NO: 32 (UCHT1), and the non-CDR (e.g., framework) sequences of the antigen-binding domain that binds the protein associated with the TCR complex have at least 80% sequence identity with the non-CDR (e.g., framework) sequences of the amino acid sequence of SEQ ID NO: 32 (UCHT1). In some embodiments, the CDR sequences of the antigen-binding domain that binds the protein associated with the TCR complex have 100% identity with the CDR sequences of the amino acid sequence of SEQ ID NO: 32 (UCHT1), and the non-CDR (e.g., framework) sequences of the antigen-binding domain that binds the protein associated with the TCR complex have at least 85% sequence identity with the non-CDR (e.g., framework) sequences of the amino acid sequence of SEQ ID NO: 32 (UCHT1). In some embodiments, the CDR sequences of the antigen-binding domain that binds the protein associated with the TCR complex have 100% identity with the CDR sequences of the amino acid sequence of SEQ ID NO: 32 (UCHT1), and the non-CDR (e.g., framework) sequences of the antigen-binding domain that binds the protein associated with the TCR complex have at least 90% sequence identity with the non-CDR (e.g., framework) sequences of the amino acid sequence of SEQ ID NO: 32 (UCHT1). In some embodiments, the CDR sequences of the antigen-binding domain that binds the protein associated with the TCR complex have 100% identity with the CDR sequences of the amino acid sequence of SEQ ID NO: 32 (UCHT1), and the non-CDR (e.g., framework) sequences of the antigen-binding domain that binds the protein associated with the TCR complex have at least 95% sequence identity with the non-CDR (e.g., framework) sequences of the amino acid sequence of SEQ ID NO: 32 (UCHT1). In some embodiments, the CDR sequences of the antigen-binding domain that binds the protein associated with the TCR complex have 100% identity with the CDR sequences of the amino acid sequence of SEQ ID NO: 32 (UCHT1), and the non-CDR (e.g., framework) sequences of the antigen-binding domain that binds the protein associated with the TCR complex have at least 96% sequence identity with the non-CDR (e.g., framework) sequences of the amino acid sequence of SEQ ID NO: 32 (UCHT1). In some embodiments, the CDR sequences of the antigen-binding domain that binds the protein associated with the TCR complex have 100% identity with the CDR sequences of the amino acid sequence of SEQ ID NO: 32 (UCHT1), and the non-CDR (e.g., framework) sequences of the antigen-binding domain that binds the protein associated with the TCR complex have at least 97% sequence identity with the non-CDR (e.g., framework) sequences of the amino acid sequence of SEQ ID NO: 32 (UCHT1). In some embodiments, the CDR sequences of the antigen-binding domain that binds the protein associated with the TCR complex have 100% identity with the CDR sequences of the amino acid sequence of SEQ ID NO: 32 (UCHT1), and the non-CDR (e.g., framework) sequences of the antigen-binding domain that binds the protein associated with the TCR complex have at least 98% sequence identity with the non-CDR (e.g., framework) sequences of the amino acid sequence of SEQ ID NO: 32 (UCHT1). In some embodiments, the CDR sequences of the antigen-binding domain that binds the protein associated with the TCR complex have 100% identity with the CDR sequences of the amino acid sequence of SEQ ID NO: 32 (UCHT1), and the non-CDR (e.g., framework) sequences of the antigen-binding domain that binds the protein associated with the TCR complex have at least 99% sequence identity with the non-CDR (e.g., framework) sequences of the amino acid sequence of SEQ ID NO: 32 (UCHT1).

[0061] In some embodiments, the polynucleotide encoding the antigen-binding domain that binds the protein associated with the TCR complex comprises a nucleotide sequence having at least 70% sequence identity with the nucleotide sequence of SEQ ID NO: 43 (UCHT1 (Y182T)). In some embodiments, the polynucleotide encoding the antigen-binding domain that binds the protein associated with the TCR complex comprises a nucleotide sequence having at least 75% sequence identity with the nucleotide sequence of SEQ ID NO: 43 (UCHT1 (Y182T)). In some embodiments, the polynucleotide encoding the antigen-binding domain that binds the protein associated with the TCR complex comprises a nucleotide sequence having at least 80% sequence identity with the nucleotide sequence of SEQ ID NO: 43 (UCHT1 (Y182T)). In some embodiments, the polynucleotide encoding the antigen-binding domain that binds the protein associated with the TCR complex comprises a nucleotide sequence having at least 85% sequence identity with the nucleotide sequence of SEQ ID NO: 43 (UCHT1 (Y182T)). In some embodiments, the polynucleotide encoding the antigen-binding domain that binds the protein associated with the TCR complex comprises a nucleotide sequence having at least 90% sequence identity with the nucleotide sequence of SEQ ID NO: 43 (UCHT1 (Y182T)). In some embodiments, the polynucleotide encoding the antigen-binding domain that binds the protein associated with the TCR complex comprises a nucleotide sequence having at least 95% sequence identity with the nucleotide sequence of SEQ ID NO: 43 (UCHT1 (Y182T)). In some embodiments, the polynucleotide encoding the antigen-binding domain that binds the protein associated with the TCR complex comprises a nucleotide sequence having at least 96% sequence identity with the nucleotide sequence of SEQ ID NO: 43 (UCHT1 (Y182T)). In some embodiments, the polynucleotide encoding the antigen-binding domain that binds the protein associated with the TCR complex comprises a nucleotide sequence having at least 97% sequence identity with the nucleotide sequence of SEQ ID NO: 43 (UCHT1 (Y182T)). In some embodiments, the polynucleotide encoding the antigen-binding domain that binds the protein associated with the TCR complex comprises a nucleotide sequence having at least 98% sequence identity with the nucleotide sequence of SEQ ID NO: 43 (UCHT1 (Y182T)). In some embodiments, the polynucleotide encoding the antigen-binding domain that binds the protein associated with the TCR complex comprises a nucleotide sequence having at least 99% sequence identity with the nucleotide sequence of SEQ ID NO: 43 (UCHT1 (Y182T)). In some embodiments, the polynucleotide encoding the antigen-binding domain that binds the protein associated with the TCR complex comprises the nucleotide sequence of SEQ ID NO: 43 (UCHT1 (Y182T)).

[0062] In some embodiments, the antigen-binding domain that binds the protein associated with the TCR complex comprises an amino acid sequence having at least 70% sequence identity with the amino acid sequence of SEQ ID NO: 44 (UCHT1 (Y182T)). In some embodiments, the antigen-binding domain that binds the protein associated with the TCR complex comprises an amino acid sequence having at least 75% sequence identity with the amino acid sequence of SEQ ID NO: 44 (UCHT1 (Y182T)). In some embodiments, the antigen-binding domain that binds the protein associated with the TCR complex comprises an amino acid sequence having at least 80% sequence identity with the amino acid sequence of SEQ ID NO: 44 (UCHT1 (Y182T)). In some embodiments, the antigen-binding domain that binds the protein associated with the TCR complex comprises an amino acid sequence having at least 85% sequence identity with the amino acid sequence of SEQ ID NO: 44 (UCHT1 (Y182T)). In some embodiments, the antigen-binding domain that binds the protein associated with the TCR complex comprises an amino acid sequence having at least 90% sequence identity with the amino acid sequence of SEQ ID NO: 44 (UCHT1 (Y182T)). In some embodiments, the antigen-binding domain that binds the protein associated with the TCR complex comprises an amino acid sequence having at least 95% sequence identity with the amino acid sequence of SEQ ID NO: 44 (UCHT1 (Y182T)). In some embodiments, the antigen-binding domain that binds the protein associated with the TCR complex comprises an amino acid sequence having at least 96% sequence identity with the amino acid sequence of SEQ ID NO: 44 (UCHT1 (Y182T)). In some embodiments, the antigen-binding domain that binds the protein associated with the TCR complex comprises an amino acid sequence having at least 97% sequence identity with the amino acid sequence of SEQ ID NO: 44 (UCHT1 (Y182T)). In some embodiments, the antigen-binding domain that binds the protein associated with the TCR complex comprises an amino acid sequence having at least 98% sequence identity with the amino acid sequence of SEQ ID NO: 44 (UCHT1 (Y182T)). In some embodiments, the antigen-binding domain that binds the protein associated with the TCR complex comprises an amino acid sequence having at least 99% sequence identity with the amino acid sequence of SEQ ID NO: 44 (UCHT1 (Y182T)). In some embodiments, the antigen-binding domain that binds the protein associated with the TCR complex comprises the amino acid sequence of SEQ ID NO: 44 (UCHT1 (Y182T)). In some embodiments, the CDR sequences of the antigen-binding domain that binds the protein associated with the TCR complex have 100% identity with the CDR sequences of the amino acid sequence of SEQ ID NO: 44 (UCHT1 (Y182T)) (i.e., the antigen-binding domain that binds the protein associated with the TCR complex comprises an amino acid sequence comprising a CDRH1, CDRH2, CDRH3, CDRL1, CDRL2, and CDRL3, each having 100% identity to the corresponding CDR in the amino acid sequence of SEQ ID NO: 44 (UCHT1 (Y182T)). In some embodiments, the CDR sequences of the antigen-binding domain that binds the protein associated with the TCR complex have 100% identity with the CDR sequences of the amino acid sequence of SEQ ID NO: 44 (UCHT1 (Y182T)), and the non-CDR (e.g., framework) sequences of the antigen-binding domain that binds the protein associated with the TCR complex have at least 80% sequence identity with the non-CDR (e.g., framework) sequences of the amino acid sequence of SEQ ID NO: 44 (UCHT1 (Y182T)). In some embodiments, the CDR sequences of the antigen-binding domain that binds the protein associated with the TCR complex have 100% identity with the CDR sequences of the amino acid sequence of SEQ ID NO: 44 (UCHT1 (Y182T)), and the non-CDR (e.g., framework) sequences of the antigen-binding domain that binds the protein associated with the TCR complex have at least 85% sequence identity with the non-CDR (e.g., framework) sequences of the amino acid sequence of SEQ ID NO: 44 (UCHT1 (Y182T)). In some embodiments, the CDR sequences of the antigen-binding domain that binds the protein associated with the TCR complex have 100% identity with the CDR sequences of the amino acid sequence of SEQ ID NO: 44 (UCHT1 (Y182T)), and the non-CDR (e.g., framework) sequences of the antigen-binding domain that binds the protein associated with the TCR complex have at least 90% sequence identity with the non-CDR (e.g., framework) sequences of the amino acid sequence of SEQ ID NO: 44 (UCHT1 (Y182T)). In some embodiments, the CDR sequences of the antigen-binding domain that binds the protein associated with the TCR complex have 100% identity with the CDR sequences of the amino acid sequence of SEQ ID NO: 44 (UCHT1 (Y182T)), and the non-CDR (e.g., framework) sequences of the antigen-binding domain that binds the protein associated with the TCR complex have at least 95% sequence identity with the non-CDR (e.g., framework) sequences of the amino acid sequence of SEQ ID NO: 44 (UCHT1 (Y182T)). In some embodiments, the CDR sequences of the antigen-binding domain that binds the protein associated with the TCR complex have 100% identity with the CDR sequences of the amino acid sequence of SEQ ID NO: 44 (UCHT1 (Y182T)), and the non-CDR (e.g., framework) sequences of the antigen-binding domain that binds the protein associated with the TCR complex have at least 96% sequence identity with the non-CDR (e.g., framework) sequences of the amino acid sequence of SEQ ID NO: 44 (UCHT1 (Y182T)). In some embodiments, the CDR sequences of the antigen-binding domain that binds the protein associated with the TCR complex have 100% identity with the CDR sequences of the amino acid sequence of SEQ ID NO: 44 (UCHT1 (Y182T)), and the non-CDR (e.g., framework) sequences of the antigen-binding domain that binds the protein associated with the TCR complex have at least 97% sequence identity with the non-CDR (e.g., framework) sequences of the amino acid sequence of SEQ ID NO: 44 (UCHT1 (Y182T)). In some embodiments, the CDR sequences of the antigen-binding domain that binds the protein associated with the TCR complex have 100% identity with the CDR sequences of the amino acid sequence of SEQ ID NO: 44 (UCHT1 (Y182T)), and the non-CDR (e.g., framework) sequences of the antigen-binding domain that binds the protein associated with the TCR complex have at least 98% sequence identity with the non-CDR (e.g., framework) sequences of the amino acid sequence of SEQ ID NO: 44 (UCHT1 (Y182T)). In some embodiments, the CDR sequences of the antigen-binding domain that binds the protein associated with the TCR complex have 100% identity with the CDR sequences of the amino acid sequence of SEQ ID NO: 44 (UCHT1 (Y182T)), and the non-CDR (e.g., framework) sequences of the antigen-binding domain that binds the protein associated with the TCR complex have at least 99% sequence identity with the non-CDR (e.g., framework) sequences of the amino acid sequence of SEQ ID NO: 44 (UCHT1 (Y182T)).

[0063] In some embodiments, the polynucleotide encoding the antigen-binding domain that binds the protein associated with the TCR complex comprises a nucleotide sequence having at least 70% sequence identity with the nucleotide sequence of SEQ ID NO: 39 (huUCHT1). In some embodiments, the polynucleotide encoding the antigen-binding domain that binds the protein associated with the TCR complex comprises a nucleotide sequence having at least 75% sequence identity with the nucleotide sequence of SEQ ID NO: 39 (huUCHT1). In some embodiments, the polynucleotide encoding the antigen-binding domain that binds the protein associated with the TCR complex comprises a nucleotide sequence having at least 80% sequence identity with the nucleotide sequence of SEQ ID NO: 39 (huUCHT1). In some embodiments, the polynucleotide encoding the antigen-binding domain that binds the protein associated with the TCR complex comprises a nucleotide sequence having at least 85% sequence identity with the nucleotide sequence of SEQ ID NO: 39 (huUCHT1). In some embodiments, the polynucleotide encoding the antigen-binding domain that binds the protein associated with the TCR complex comprises a nucleotide sequence having at least 90% sequence identity with the nucleotide sequence of SEQ ID NO: 39 (huUCHT1). In some embodiments, the polynucleotide encoding the antigen-binding domain that binds the protein associated with the TCR complex comprises a nucleotide sequence having at least 95% sequence identity with the nucleotide sequence of SEQ ID NO: 39 (huUCHT1). In some embodiments, the polynucleotide encoding the antigen-binding domain that binds the protein associated with the TCR complex comprises a nucleotide sequence having at least 96% sequence identity with the nucleotide sequence of SEQ ID NO: 39 (huUCHT1). In some embodiments, the polynucleotide encoding the antigen-binding domain that binds the protein associated with the TCR complex comprises a nucleotide sequence having at least 97% sequence identity with the nucleotide sequence of SEQ ID NO: 39 (huUCHT1). In some embodiments, the polynucleotide encoding the antigen-binding domain that binds the protein associated with the TCR complex comprises a nucleotide sequence having at least 98% sequence identity with the nucleotide sequence of SEQ ID NO: 39 (huUCHT1). In some embodiments, the polynucleotide encoding the antigen-binding domain that binds the protein associated with the TCR complex comprises a nucleotide sequence having at least 99% sequence identity with the nucleotide sequence of SEQ ID NO: 39 (huUCHT1). In some embodiments, the polynucleotide encoding the antigen-binding domain that binds the protein associated with the TCR complex comprises the nucleotide sequence of SEQ ID NO: 39 (huUCHT1).

[0064] In some embodiments, the antigen-binding domain that binds the protein associated with the TCR complex comprises an amino acid sequence having at least 70% sequence identity with the amino acid sequence of SEQ ID NO: 40 (huUCHT1). In some embodiments, the antigen-binding domain that binds the protein associated with the TCR complex comprises an amino acid sequence having at least 75% sequence identity with the amino acid sequence of SEQ ID NO: 40 (huUCHT1). In some embodiments, the antigen-binding domain that binds the protein associated with the TCR complex comprises an amino acid sequence having at least 80% sequence identity with the amino acid sequence of SEQ ID NO: 40 (huUCHT1). In some embodiments, the antigen-binding domain that binds the protein associated with the TCR complex comprises an amino acid sequence having at least 85% sequence identity with the amino acid sequence of SEQ ID NO: 40 (huUCHT1). In some embodiments, the antigen-binding domain that binds the protein associated with the TCR complex comprises an amino acid sequence having at least 90% sequence identity with the amino acid sequence of SEQ ID NO: 40 (huUCHT1). In some embodiments, the antigen-binding domain that binds the protein associated with the TCR complex comprises an amino acid sequence having at least 95% sequence identity with the amino acid sequence of SEQ ID NO: 40 (huUCHT1). In some embodiments, the antigen-binding domain that binds the protein associated with the TCR complex comprises an amino acid sequence having at least 96% sequence identity with the amino acid sequence of SEQ ID NO: 40 (huUCHT1). In some embodiments, the antigen-binding domain that binds the protein associated with the TCR complex comprises an amino acid sequence having at least 97% sequence identity with the amino acid sequence of SEQ ID NO: 40 (huUCHT1). In some embodiments, the antigen-binding domain that binds the protein associated with the TCR complex comprises an amino acid sequence having at least 98% sequence identity with the amino acid sequence of SEQ ID NO: 40 (huUCHT1). In some embodiments, the antigen-binding domain that binds the protein associated with the TCR complex comprises an amino acid sequence having at least 99% sequence identity with the amino acid sequence of SEQ ID NO: 40 (huUCHT1). In some embodiments, the antigen-binding domain that binds the protein associated with the TCR complex comprises the amino acid sequence of SEQ ID NO: 40 (huUCHT1). In some embodiments, the CDR sequences of the antigen-binding domain that binds the protein associated with the TCR complex have 100% identity with the CDR sequences of the amino acid sequence of SEQ ID NO: 40 (huUCHT1) (i.e., the antigen-binding domain that binds the protein associated with the TCR complex comprises an amino acid sequence comprising a CDRH1, CDRH2, CDRH3, CDRL1, CDRL2, and CDRL3, each having 100% identity to the corresponding CDR in the amino acid sequence of SEQ ID NO: 40 (huUCHT1). In some embodiments, the CDR sequences of the antigen-binding domain that binds the protein associated with the TCR complex have 100% identity with the CDR sequences of the amino acid sequence of SEQ ID NO: 40 (huUCHT1), and the non-CDR (e.g., framework) sequences of the antigen-binding domain that binds the protein associated with the TCR complex have at least 80% sequence identity with the non-CDR (e.g., framework) sequences of the amino acid sequence of SEQ ID NO: 40 (huUCHT1). In some embodiments, the CDR sequences of the antigen-binding domain that binds the protein associated with the TCR complex have 100% identity with the CDR sequences of the amino acid sequence of SEQ ID NO: 40 (huUCHT1), and the non-CDR (e.g., framework) sequences of the antigen-binding domain that binds the protein associated with the TCR complex have at least 85% sequence identity with the non-CDR (e.g., framework) sequences of the amino acid sequence of SEQ ID NO: 40 (huUCHT1). In some embodiments, the CDR sequences of the antigen-binding domain that binds the protein associated with the TCR complex have 100% identity with the CDR sequences of the amino acid sequence of SEQ ID NO: 40 (huUCHT1), and the non-CDR (e.g., framework) sequences of the antigen-binding domain that binds the protein associated with the TCR complex have at least 90% sequence identity with the non-CDR (e.g., framework) sequences of the amino acid sequence of SEQ ID NO: 40 (huUCHT1). In some embodiments, the CDR sequences of the antigen-binding domain that binds the protein associated with the TCR complex have 100% identity with the CDR sequences of the amino acid sequence of SEQ ID NO: 40 (huUCHT1), and the non-CDR (e.g., framework) sequences of the antigen-binding domain that binds the protein associated with the TCR complex have at least 95% sequence identity with the non-CDR (e.g., framework) sequences of the amino acid sequence of SEQ ID NO: 40 (huUCHT1). In some embodiments, the CDR sequences of the antigen-binding domain that binds the protein associated with the TCR complex have 100% identity with the CDR sequences of the amino acid sequence of SEQ ID NO: 40 (huUCHT1), and the non-CDR (e.g., framework) sequences of the antigen-binding domain that binds the protein associated with the TCR complex have at least 96% sequence identity with the non-CDR (e.g., framework) sequences of the amino acid sequence of SEQ ID NO: 40 (huUCHT1). In some embodiments, the CDR sequences of the antigen-binding domain that binds the protein associated with the TCR complex have 100% identity with the CDR sequences of the amino acid sequence of SEQ ID NO: 40 (huUCHT1), and the non-CDR (e.g., framework) sequences of the antigen-binding domain that binds the protein associated with the TCR complex have at least 97% sequence identity with the non-CDR (e.g., framework) sequences of the amino acid sequence of SEQ ID NO: 40 (huUCHT1). In some embodiments, the CDR sequences of the antigen-binding domain that binds the protein associated with the TCR complex have 100% identity with the CDR sequences of the amino acid sequence of SEQ ID NO: 40 (huUCHT1), and the non-CDR (e.g., framework) sequences of the antigen-binding domain that binds the protein associated with the TCR complex have at least 98% sequence identity with the non-CDR (e.g., framework) sequences of the amino acid sequence of SEQ ID NO: 40 (huUCHT1). In some embodiments, the CDR sequences of the antigen-binding domain that binds the protein associated with the TCR complex have 100% identity with the CDR sequences of the amino acid sequence of SEQ ID NO: 40 (huUCHT1), and the non-CDR (e.g., framework) sequences of the antigen-binding domain that binds the protein associated with the TCR complex have at least 99% sequence identity with the non-CDR (e.g., framework) sequences of the amino acid sequence of SEQ ID NO: 40 (huUCHT1).

[0065] In some embodiments, the polynucleotide encoding the antigen-binding domain that binds the protein associated with the TCR complex comprises a nucleotide sequence having at least 70% sequence identity with the nucleotide sequence of SEQ ID NO: 41 (huUCHT1 (Y177T)). In some embodiments, the polynucleotide encoding the antigen-binding domain that binds the protein associated with the TCR complex comprises a nucleotide sequence having at least 75% sequence identity with the nucleotide sequence of SEQ ID NO: 41 (huUCHT1 (Y177T)). In some embodiments, the polynucleotide encoding the antigen-binding domain that binds the protein associated with the TCR complex comprises a nucleotide sequence having at least 80% sequence identity with the nucleotide sequence of SEQ ID NO: 41 (huUCHT1 (Y177T)). In some embodiments, the polynucleotide encoding the antigen-binding domain that binds the protein associated with the TCR complex comprises a nucleotide sequence having at least 85% sequence identity with the nucleotide sequence of SEQ ID NO: 41 (huUCHT1 (Y177T)). In some embodiments, the polynucleotide encoding the antigen-binding domain that binds the protein associated with the TCR complex comprises a nucleotide sequence having at least 90% sequence identity with the nucleotide sequence of SEQ ID NO: 41 (huUCHT1 (Y177T)). In some embodiments, the polynucleotide encoding the antigen-binding domain that binds the protein associated with the TCR complex comprises a nucleotide sequence having at least 95% sequence identity with the nucleotide sequence of SEQ ID NO: 41 (huUCHT1 (Y177T)). In some embodiments, the polynucleotide encoding the antigen-binding domain that binds the protein associated with the TCR complex comprises a nucleotide sequence having at least 96% sequence identity with the nucleotide sequence of SEQ ID NO: 41 (huUCHT1 (Y177T)). In some embodiments, the polynucleotide encoding the antigen-binding domain that binds the protein associated with the TCR complex comprises a nucleotide sequence having at least 97% sequence identity with the nucleotide sequence of SEQ ID NO: 41 (huUCHT1 (Y177T)). In some embodiments, the polynucleotide encoding the antigen-binding domain that binds the protein associated with the TCR complex comprises a nucleotide sequence having at least 98% sequence identity with the nucleotide sequence of SEQ ID NO: 41 (huUCHT1 (Y177T)). In some embodiments, the polynucleotide encoding the antigen-binding domain that binds the protein associated with the TCR complex comprises a nucleotide sequence having at least 99% sequence identity with the nucleotide sequence of SEQ ID NO: 41 (huUCHT1 (Y177T)). In some embodiments, the polynucleotide encoding the antigen-binding domain that binds the protein associated with the TCR complex comprises the nucleotide sequence of SEQ ID NO: 41 (huUCHT1 (Y177T)).

[0066] In some embodiments, the antigen-binding domain that binds the protein associated with the TCR complex comprises an amino acid sequence having at least 70% sequence identity with the amino acid sequence of SEQ ID NO: 42 (huUCHT1 (Y177T)). In some embodiments, the antigen-binding domain that binds the protein associated with the TCR complex comprises an amino acid sequence having at least 75% sequence identity with the amino acid sequence of SEQ ID NO: 42 (huUCHT1 (Y177T)). In some embodiments, the antigen-binding domain that binds the protein associated with the TCR complex comprises an amino acid sequence having at least 80% sequence identity with the amino acid sequence of SEQ ID NO: 42 (huUCHT1 (Y177T)). In some embodiments, the antigen-binding domain that binds the protein associated with the TCR complex comprises an amino acid sequence having at least 85% sequence identity with the amino acid sequence of SEQ ID NO: 42 (huUCHT1 (Y177T)). In some embodiments, the antigen-binding domain that binds the protein associated with the TCR complex comprises an amino acid sequence having at least 90% sequence identity with the amino acid sequence of SEQ ID NO: 42 (huUCHT1 (Y177T)). In some embodiments, the antigen-binding domain that binds the protein associated with the TCR complex comprises an amino acid sequence having at least 95% sequence identity with the amino acid sequence of SEQ ID NO: 42 (huUCHT1 (Y177T)). In some embodiments, the antigen-binding domain that binds the protein associated with the TCR complex comprises an amino acid sequence having at least 96% sequence identity with the amino acid sequence of SEQ ID NO: 42 (huUCHT1 (Y177T)). In some embodiments, the antigen-binding domain that binds the protein associated with the TCR complex comprises an amino acid sequence having at least 97% sequence identity with the amino acid sequence of SEQ ID NO: 42 (huUCHT1 (Y177T)). In some embodiments, the antigen-binding domain that binds the protein associated with the TCR complex comprises an amino acid sequence having at least 98% sequence identity with the amino acid sequence of SEQ ID NO: 42 (huUCHT1 (Y177T)). In some embodiments, the antigen-binding domain that binds the protein associated with the TCR complex comprises an amino acid sequence having at least 99% sequence identity with the amino acid sequence of SEQ ID NO: 42 (huUCHT1 (Y177T)). In some embodiments, the antigen-binding domain that binds the protein associated with the TCR complex comprises the amino acid sequence of SEQ ID NO: 42 (huUCHT1 (Y177T)). In some embodiments, the CDR sequences of the antigen-binding domain that binds the protein associated with the TCR complex have 100% identity with the CDR sequences of the amino acid sequence of SEQ ID NO: 42 (huUCHT1 (Y177T)) (i.e., the antigen-binding domain that binds the protein associated with the TCR complex comprises an amino acid sequence comprising a CDRH1, CDRH2, CDRH3, CDRL1, CDRL2, and CDRL3, each having 100% identity to the corresponding CDR in the amino acid sequence of SEQ ID NO: 42 (huUCHT1 (Y177T)). In some embodiments, the CDR sequences of the antigen-binding domain that binds the protein associated with the TCR complex have 100% identity with the CDR sequences of the amino acid sequence of SEQ ID NO: 42 (huUCHT1 (Y177T)), and the non-CDR (e.g., framework) sequences of the antigen-binding domain that binds the protein associated with the TCR complex have at least 80% sequence identity with the non-CDR (e.g., framework) sequences of the amino acid sequence of SEQ ID NO: 42 (huUCHT1 (Y177T)). In some embodiments, the CDR sequences of the antigen-binding domain that binds the protein associated with the TCR complex have 100% identity with the CDR sequences of the amino acid sequence of SEQ ID NO: 42 (huUCHT1 (Y177T)), and the non-CDR (e.g., framework) sequences of the antigen-binding domain that binds the protein associated with the TCR complex have at least 85% sequence identity with the non-CDR (e.g., framework) sequences of the amino acid sequence of SEQ ID NO: 42 (huUCHT1 (Y177T)). In some embodiments, the CDR sequences of the antigen-binding domain that binds the protein associated with the TCR complex have 100% identity with the CDR sequences of the amino acid sequence of SEQ ID NO: 42 (huUCHT1 (Y177T)), and the non-CDR (e.g., framework) sequences of the antigen-binding domain that binds the protein associated with the TCR complex have at least 90% sequence identity with the non-CDR (e.g., framework) sequences of the amino acid sequence of SEQ ID NO: 42 (huUCHT1 (Y177T)). In some embodiments, the CDR sequences of the antigen-binding domain that binds the protein associated with the TCR complex have 100% identity with the CDR sequences of the amino acid sequence of SEQ ID NO: 42 (huUCHT1 (Y177T)), and the non-CDR (e.g., framework) sequences of the antigen-binding domain that binds the protein associated with the TCR complex have at least 95% sequence identity with the non-CDR (e.g., framework) sequences of the amino acid sequence of SEQ ID NO: 42 (huUCHT1 (Y177T)). In some embodiments, the CDR sequences of the antigen-binding domain that binds the protein associated with the TCR complex have 100% identity with the CDR sequences of the amino acid sequence of SEQ ID NO: 42 (huUCHT1 (Y177T)), and the non-CDR (e.g., framework) sequences of the antigen-binding domain that binds the protein associated with the TCR complex have at least 96% sequence identity with the non-CDR (e.g., framework) sequences of the amino acid sequence of SEQ ID NO: 42 (huUCHT1 (Y177T)). In some embodiments, the CDR sequences of the antigen-binding domain that binds the protein associated with the TCR complex have 100% identity with the CDR sequences of the amino acid sequence of SEQ ID NO: 42 (huUCHT1 (Y177T)), and the non-CDR (e.g., framework) sequences of the antigen-binding domain that binds the protein associated with the TCR complex have at least 97% sequence identity with the non-CDR (e.g., framework) sequences of the amino acid sequence of SEQ ID NO: 42 (huUCHT1 (Y177T)). In some embodiments, the CDR sequences of the antigen-binding domain that binds the protein associated with the TCR complex have 100% identity with the CDR sequences of the amino acid sequence of SEQ ID NO: 42 (huUCHT1 (Y177T)), and the non-CDR (e.g., framework) sequences of the antigen-binding domain that binds the protein associated with the TCR complex have at least 98% sequence identity with the non-CDR (e.g., framework) sequences of the amino acid sequence of SEQ ID NO: 42 (huUCHT1 (Y177T)). In some embodiments, the CDR sequences of the antigen-binding domain that binds the protein associated with the TCR complex have 100% identity with the CDR sequences of the amino acid sequence of SEQ ID NO: 42 (huUCHT1 (Y177T)), and the non-CDR (e.g., framework) sequences of the antigen-binding domain that binds the protein associated with the TCR complex have at least 99% sequence identity with the non-CDR (e.g., framework) sequences of the amino acid sequence of SEQ ID NO: 42 (huUCHT1 (Y177T)).

[0067] In some embodiments, the antigen-binding domain that binds to the protein associated with the TCR complex is OKT3. In some embodiments, the murine OKT3 antigen-binding domain is encoded by SEQ ID NO: 33. In some embodiments, the OKT3 antigen-binding domain comprises SEQ ID NO: 34.

[0068] In some embodiments, the polynucleotide encoding the antigen-binding domain that binds the protein associated with the TCR complex comprises a nucleotide sequence having at least 70% sequence identity with the nucleotide sequence of SEQ ID NO: 33 (OKT3). In some embodiments, the polynucleotide encoding the antigen-binding domain that binds the protein associated with the TCR complex comprises a nucleotide sequence having at least 75% sequence identity with the nucleotide sequence of SEQ ID NO: 33 (OKT3). In some embodiments, the polynucleotide encoding the antigen-binding domain that binds the protein associated with the TCR complex comprises a nucleotide sequence having at least 80% sequence identity with the nucleotide sequence of SEQ ID NO: 33 (OKT3). In some embodiments, the polynucleotide encoding the antigen-binding domain that binds the protein associated with the TCR complex comprises a nucleotide sequence having at least 85% sequence identity with the nucleotide sequence of SEQ ID NO: 33 (OKT3). In some embodiments, the polynucleotide encoding the antigen-binding domain that binds the protein associated with the TCR complex comprises a nucleotide sequence having at least 90% sequence identity with the nucleotide sequence of SEQ ID NO: 33 (OKT3). In some embodiments, the polynucleotide encoding the antigen-binding domain that binds the protein associated with the TCR complex comprises a nucleotide sequence having at least 95% sequence identity with the nucleotide sequence of SEQ ID NO: 33 (OKT3). In some embodiments, the polynucleotide encoding the antigen-binding domain that binds the protein associated with the TCR complex comprises a nucleotide sequence having at least 96% sequence identity with the nucleotide sequence of SEQ ID NO: 33 (OKT3). In some embodiments, the polynucleotide encoding the antigen-binding domain that binds the protein associated with the TCR complex comprises a nucleotide sequence having at least 97% sequence identity with the nucleotide sequence of SEQ ID NO: 33 (OKT3). In some embodiments, the polynucleotide encoding the antigen-binding domain that binds the protein associated with the TCR complex comprises a nucleotide sequence having at least 98% sequence identity with the nucleotide sequence of SEQ ID NO: 33 (OKT3). In some embodiments, the polynucleotide encoding the antigen-binding domain that binds the protein associated with the TCR complex comprises a nucleotide sequence having at least 99% sequence identity with the nucleotide sequence of SEQ ID NO: 33 (OKT3). In some embodiments, the polynucleotide encoding the antigen-binding domain that binds the protein associated with the TCR complex comprises the nucleotide sequence of SEQ ID NO: 33 (OKT3).

[0069] In some embodiments, the antigen-binding domain that binds the protein associated with the TCR complex comprises an amino acid sequence having at least 70% sequence identity with the amino acid sequence of SEQ ID NO: 34 (OKT3). In some embodiments, the antigen-binding domain that binds the protein associated with the TCR complex comprises an amino acid sequence having at least 75% sequence identity with the amino acid sequence of SEQ ID NO: 34 (OKT3). In some embodiments, the antigen-binding domain that binds the protein associated with the TCR complex comprises an amino acid sequence having at least 80% sequence identity with the amino acid sequence of SEQ ID NO: 34 (OKT3). In some embodiments, the antigen-binding domain that binds the protein associated with the TCR complex comprises an amino acid sequence having at least 85% sequence identity with the amino acid sequence of SEQ ID NO: 34 (OKT3). In some embodiments, the antigen-binding domain that binds the protein associated with the TCR complex comprises an amino acid sequence having at least 90% sequence identity with the amino acid sequence of SEQ ID NO: 34 (OKT3). In some embodiments, the antigen-binding domain that binds the protein associated with the TCR complex comprises an amino acid sequence having at least 95% sequence identity with the amino acid sequence of SEQ ID NO: 34 (OKT3). In some embodiments, the antigen-binding domain that binds the protein associated with the TCR complex comprises an amino acid sequence having at least 96% sequence identity with the amino acid sequence of SEQ ID NO: 34 (OKT3). In some embodiments, the antigen-binding domain that binds the protein associated with the TCR complex comprises an amino acid sequence having at least 97% sequence identity with the amino acid sequence of SEQ ID NO: 34 (OKT3). In some embodiments, the antigen-binding domain that binds the protein associated with the TCR complex comprises an amino acid sequence having at least 98% sequence identity with the amino acid sequence of SEQ ID NO: 34 (OKT3). In some embodiments, the antigen-binding domain that binds the protein associated with the TCR complex comprises an amino acid sequence having at least 99% sequence identity with the amino acid sequence of SEQ ID NO: 34 (OKT3). In some embodiments, the antigen-binding domain that binds the protein associated with the TCR complex comprises the amino acid sequence of SEQ ID NO: 34 (OKT3). In some embodiments, the CDR sequences of the antigen-binding domain that binds the protein associated with the TCR complex have 100% identity with the CDR sequences of the amino acid sequence of SEQ ID NO: 34 (OKT3) (i.e., the antigen-binding domain that binds the protein associated with the TCR complex comprises an amino acid sequence comprising a CDRH1, CDRH2, CDRH3, CDRL1, CDRL2, and CDRL3, each having 100% identity to the corresponding CDR in the amino acid sequence of SEQ ID NO: 34 (OKT3). In some embodiments, the CDR sequences of the antigen-binding domain that binds the protein associated with the TCR complex have 100% identity with the CDR sequences of the amino acid sequence of SEQ ID NO: 34 (OKT3), and the non-CDR (e.g., framework) sequences of the antigen-binding domain that binds the protein associated with the TCR complex have at least 80% sequence identity with the non-CDR (e.g., framework) sequences of the amino acid sequence of SEQ ID NO: 34 (OKT3). In some embodiments, the CDR sequences of the antigen-binding domain that binds the protein associated with the TCR complex have 100% identity with the CDR sequences of the amino acid sequence of SEQ ID NO: 34 (OKT3), and the non-CDR (e.g., framework) sequences of the antigen-binding domain that binds the protein associated with the TCR complex have at least 85% sequence identity with the non-CDR (e.g., framework) sequences of the amino acid sequence of SEQ ID NO: 34 (OKT3). In some embodiments, the CDR sequences of the antigen-binding domain that binds the protein associated with the TCR complex have 100% identity with the CDR sequences of the amino acid sequence of SEQ ID NO: 34 (OKT3), and the non-CDR (e.g., framework) sequences of the antigen-binding domain that binds the protein associated with the TCR complex have at least 90% sequence identity with the non-CDR (e.g., framework) sequences of the amino acid sequence of SEQ ID NO: 34 (OKT3). In some embodiments, the CDR sequences of the antigen-binding domain that binds the protein associated with the TCR complex have 100% identity with the CDR sequences of the amino acid sequence of SEQ ID NO: 34 (OKT3), and the non-CDR (e.g., framework) sequences of the antigen-binding domain that binds the protein associated with the TCR complex have at least 95% sequence identity with the non-CDR (e.g., framework) sequences of the amino acid sequence of SEQ ID NO: 34 (OKT3). In some embodiments, the CDR sequences of the antigen-binding domain that binds the protein associated with the TCR complex have 100% identity with the CDR sequences of the amino acid sequence of SEQ ID NO: 34 (OKT3), and the non-CDR (e.g., framework) sequences of the antigen-binding domain that binds the protein associated with the TCR complex have at least 96% sequence identity with the non-CDR (e.g., framework) sequences of the amino acid sequence of SEQ ID NO: 34 (OKT3). In some embodiments, the CDR sequences of the antigen-binding domain that binds the protein associated with the TCR complex have 100% identity with the CDR sequences of the amino acid sequence of SEQ ID NO: 34 (OKT3), and the non-CDR (e.g., framework) sequences of the antigen-binding domain that binds the protein associated with the TCR complex have at least 97% sequence identity with the non-CDR (e.g., framework) sequences of the amino acid sequence of SEQ ID NO: 34 (OKT3). In some embodiments, the CDR sequences of the antigen-binding domain that binds the protein associated with the TCR complex have 100% identity with the CDR sequences of the amino acid sequence of SEQ ID NO: 34 (OKT3), and the non-CDR (e.g., framework) sequences of the antigen-binding domain that binds the protein associated with the TCR complex have at least 98% sequence identity with the non-CDR (e.g., framework) sequences of the amino acid sequence of SEQ ID NO: 34 (OKT3). In some embodiments, the CDR sequences of the antigen-binding domain that binds the protein associated with the TCR complex have 100% identity with the CDR sequences of the amino acid sequence of SEQ ID NO: 34 (OKT3), and the non-CDR (e.g., framework) sequences of the antigen-binding domain that binds the protein associated with the TCR complex have at least 99% sequence identity with the non-CDR (e.g., framework) sequences of the amino acid sequence of SEQ ID NO: 34 (OKT3).

[0070] In some embodiments, the antigen-binding domain that binds to the protein associated with the TCR complex is F6A. In some embodiments, the murine F6A antigen-binding domain is encoded by SEQ ID NO: 35. In some embodiments, the F6A antigen-binding domain comprises SEQ ID NO: 36.

[0071] In some embodiments, the polynucleotide encoding the antigen-binding domain that binds the protein associated with the TCR complex comprises a nucleotide sequence having at least 70% sequence identity with the nucleotide sequence of SEQ ID NO: 35 (F6A). In some embodiments, the polynucleotide encoding the antigen-binding domain that binds the protein associated with the TCR complex comprises a nucleotide sequence having at least 75% sequence identity with the nucleotide sequence of SEQ ID NO: 35 (F6A). In some embodiments, the polynucleotide encoding the antigen-binding domain that binds the protein associated with the TCR complex comprises a nucleotide sequence having at least 80% sequence identity with the nucleotide sequence of SEQ ID NO: 35 (F6A). In some embodiments, the polynucleotide encoding the antigen-binding domain that binds the protein associated with the TCR complex comprises a nucleotide sequence having at least 85% sequence identity with the nucleotide sequence of SEQ ID NO: 35 (F6A). In some embodiments, the polynucleotide encoding the antigen-binding domain that binds the protein associated with the TCR complex comprises a nucleotide sequence having at least 90% sequence identity with the nucleotide sequence of SEQ ID NO: 35 (F6A). In some embodiments, the polynucleotide encoding the antigen-binding domain that binds the protein associated with the TCR complex comprises a nucleotide sequence having at least 95% sequence identity with the nucleotide sequence of SEQ ID NO: 35 (F6A). In some embodiments, the polynucleotide encoding the antigen-binding domain that binds the protein associated with the TCR complex comprises a nucleotide sequence having at least 96% sequence identity with the nucleotide sequence of SEQ ID NO: 35 (F6A). In some embodiments, the polynucleotide encoding the antigen-binding domain that binds the protein associated with the TCR complex comprises a nucleotide sequence having at least 97% sequence identity with the nucleotide sequence of SEQ ID NO: 35 (F6A). In some embodiments, the polynucleotide encoding the antigen-binding domain that binds the protein associated with the TCR complex comprises a nucleotide sequence having at least 98% sequence identity with the nucleotide sequence of SEQ ID NO: 35 (F6A). In some embodiments, the polynucleotide encoding the antigen-binding domain that binds the protein associated with the TCR complex comprises a nucleotide sequence having at least 99% sequence identity with the nucleotide sequence of SEQ ID NO: 35 (F6A). In some embodiments, the polynucleotide encoding the antigen-binding domain that binds the protein associated with the TCR complex comprises the nucleotide sequence of SEQ ID NO: 35 (F6A).

[0072] In some embodiments, the antigen-binding domain that binds the protein associated with the TCR complex comprises an amino acid sequence having at least 70% sequence identity with the amino acid sequence of SEQ ID NO: 36 (F6A). In some embodiments, the antigen-binding domain that binds the protein associated with the TCR complex comprises an amino acid sequence having at least 75% sequence identity with the amino acid sequence of SEQ ID NO: 36 (F6A). In some embodiments, the antigen-binding domain that binds the protein associated with the TCR complex comprises an amino acid sequence having at least 80% sequence identity with the amino acid sequence of SEQ ID NO: 36 (F6A). In some embodiments, the antigen-binding domain that binds the protein associated with the TCR complex comprises an amino acid sequence having at least 85% sequence identity with the amino acid sequence of SEQ ID NO: 36 (F6A). In some embodiments, the antigen-binding domain that binds the protein associated with the TCR complex comprises an amino acid sequence having at least 90% sequence identity with the amino acid sequence of SEQ ID NO: 36 (F6A). In some embodiments, the antigen-binding domain that binds the protein associated with the TCR complex comprises an amino acid sequence having at least 95% sequence identity with the amino acid sequence of SEQ ID NO: 36 (F6A). In some embodiments, the antigen-binding domain that binds the protein associated with the TCR complex comprises an amino acid sequence having at least 96% sequence identity with the amino acid sequence of SEQ ID NO: 36 (F6A). In some embodiments, the antigen-binding domain that binds the protein associated with the TCR complex comprises an amino acid sequence having at least 97% sequence identity with the amino acid sequence of SEQ ID NO: 36 (F6A). In some embodiments, the antigen-binding domain that binds the protein associated with the TCR complex comprises an amino acid sequence having at least 98% sequence identity with the amino acid sequence of SEQ ID NO: 36 (F6A). In some embodiments, the antigen-binding domain that binds the protein associated with the TCR complex comprises an amino acid sequence having at least 99% sequence identity with the amino acid sequence of SEQ ID NO: 36 (F6A). In some embodiments, the antigen-binding domain that binds the protein associated with the TCR complex comprises the amino acid sequence of SEQ ID NO: 36 (F6A). In some embodiments, the CDR sequences of the antigen-binding domain that binds the protein associated with the TCR complex have 100% identity with the CDR sequences of the amino acid sequence of SEQ ID NO: 36 (F6A) (i.e., the antigen-binding domain that binds the protein associated with the TCR complex comprises an amino acid sequence comprising a CDRH1, CDRH2, CDRH3, CDRL1, CDRL2, and CDRL3, each having 100% identity to the corresponding CDR in the amino acid sequence of SEQ ID NO: 36 (F6A). In some embodiments, the CDR sequences of the antigen-binding domain that binds the protein associated with the TCR complex have 100% identity with the CDR sequences of the amino acid sequence of SEQ ID NO: 36 (F6A), and the non-CDR (e.g., framework) sequences of the antigen-binding domain that binds the protein associated with the TCR complex have at least 80% sequence identity with the non-CDR (e.g., framework) sequences of the amino acid sequence of SEQ ID NO: 36 (F6A). In some embodiments, the CDR sequences of the antigen-binding domain that binds the protein associated with the TCR complex have 100% identity with the CDR sequences of the amino acid sequence of SEQ ID NO: 36 (F6A), and the non-CDR (e.g., framework) sequences of the antigen-binding domain that binds the protein associated with the TCR complex have at least 85% sequence identity with the non-CDR (e.g., framework) sequences of the amino acid sequence of SEQ ID NO: 36 (F6A). In some embodiments, the CDR sequences of the antigen-binding domain that binds the protein associated with the TCR complex have 100% identity with the CDR sequences of the amino acid sequence of SEQ ID NO: 36 (F6A), and the non-CDR (e.g., framework) sequences of the antigen-binding domain that binds the protein associated with the TCR complex have at least 90% sequence identity with the non-CDR (e.g., framework) sequences of the amino acid sequence of SEQ ID NO: 36 (F6A). In some embodiments, the CDR sequences of the antigen-binding domain that binds the protein associated with the TCR complex have 100% identity with the CDR sequences of the amino acid sequence of SEQ ID NO: 36 (F6A), and the non-CDR (e.g., framework) sequences of the antigen-binding domain that binds the protein associated with the TCR complex have at least 95% sequence identity with the non-CDR (e.g., framework) sequences of the amino acid sequence of SEQ ID NO: 36 (F6A). In some embodiments, the CDR sequences of the antigen-binding domain that binds the protein associated with the TCR complex have 100% identity with the CDR sequences of the amino acid sequence of SEQ ID NO: 36 (F6A), and the non-CDR (e.g., framework) sequences of the antigen-binding domain that binds the protein associated with the TCR complex have at least 96% sequence identity with the non-CDR (e.g., framework) sequences of the amino acid sequence of SEQ ID NO: 36 (F6A). In some embodiments, the CDR sequences of the antigen-binding domain that binds the protein associated with the TCR complex have 100% identity with the CDR sequences of the amino acid sequence of SEQ ID NO: 36 (F6A), and the non-CDR (e.g., framework) sequences of the antigen-binding domain that binds the protein associated with the TCR complex have at least 97% sequence identity with the non-CDR (e.g., framework) sequences of the amino acid sequence of SEQ ID NO: 36 (F6A). In some embodiments, the CDR sequences of the antigen-binding domain that binds the protein associated with the TCR complex have 100% identity with the CDR sequences of the amino acid sequence of SEQ ID NO: 36 (F6A), and the non-CDR (e.g., framework) sequences of the antigen-binding domain that binds the protein associated with the TCR complex have at least 98% sequence identity with the non-CDR (e.g., framework) sequences of the amino acid sequence of SEQ ID NO: 36 (F6A). In some embodiments, the CDR sequences of the antigen-binding domain that binds the protein associated with the TCR complex have 100% identity with the CDR sequences of the amino acid sequence of SEQ ID NO: 36 (F6A), and the non-CDR (e.g., framework) sequences of the antigen-binding domain that binds the protein associated with the TCR complex have at least 99% sequence identity with the non-CDR (e.g., framework) sequences of the amino acid sequence of SEQ ID NO: 36 (F6A).

[0073] In some embodiments, the antigen-binding domain that binds to the protein associated with the TCR complex is L2K. In some embodiments, the murine L2K antigen-binding domain is encoded by SEQ ID NO: 37. In some embodiments, the L2K antigen-binding domain comprises SEQ ID NO: 38.

[0074] In some embodiments, the polynucleotide encoding the antigen-binding domain that binds the protein associated with the TCR complex comprises a nucleotide sequence having at least 70% sequence identity with the nucleotide sequence of SEQ ID NO: 37 (L2K). In some embodiments, the polynucleotide encoding the antigen-binding domain that binds the protein associated with the TCR complex comprises a nucleotide sequence having at least 75% sequence identity with the nucleotide sequence of SEQ ID NO: 37 (L2K). In some embodiments, the polynucleotide encoding the antigen-binding domain that binds the protein associated with the TCR complex comprises a nucleotide sequence having at least 80% sequence identity with the nucleotide sequence of SEQ ID NO: 37 (L2K). In some embodiments, the polynucleotide encoding the antigen-binding domain that binds the protein associated with the TCR complex comprises a nucleotide sequence having at least 85% sequence identity with the nucleotide sequence of SEQ ID NO: 37 (L2K). In some embodiments, the polynucleotide encoding the antigen-binding domain that binds the protein associated with the TCR complex comprises a nucleotide sequence having at least 90% sequence identity with the nucleotide sequence of SEQ ID NO: 37 (L2K). In some embodiments, the polynucleotide encoding the antigen-binding domain that binds the protein associated with the TCR complex comprises a nucleotide sequence having at least 95% sequence identity with the nucleotide sequence of SEQ ID NO: 37 (L2K). In some embodiments, the polynucleotide encoding the antigen-binding domain that binds the protein associated with the TCR complex comprises a nucleotide sequence having at least 96% sequence identity with the nucleotide sequence of SEQ ID NO: 37 (L2K). In some embodiments, the polynucleotide encoding the antigen-binding domain that binds the protein associated with the TCR complex comprises a nucleotide sequence having at least 97% sequence identity with the nucleotide sequence of SEQ ID NO: 37 (L2K). In some embodiments, the polynucleotide encoding the antigen-binding domain that binds the protein associated with the TCR complex comprises a nucleotide sequence having at least 98% sequence identity with the nucleotide sequence of SEQ ID NO: 37 (L2K). In some embodiments, the polynucleotide encoding the antigen-binding domain that binds the protein associated with the TCR complex comprises a nucleotide sequence having at least 99% sequence identity with the nucleotide sequence of SEQ ID NO: 37 (L2K). In some embodiments, the polynucleotide encoding the antigen-binding domain that binds the protein associated with the TCR complex comprises the nucleotide sequence of SEQ ID NO: 37 (L2K).

[0075] In some embodiments, the antigen-binding domain that binds the protein associated with the TCR complex comprises an amino acid sequence having at least 70% sequence identity with the amino acid sequence of SEQ ID NO: 38 (L2K). In some embodiments, the antigen-binding domain that binds the protein associated with the TCR complex comprises an amino acid sequence having at least 75% sequence identity with the amino acid sequence of SEQ ID NO: 38 (L2K). In some embodiments, the antigen-binding domain that binds the protein associated with the TCR complex comprises an amino acid sequence having at least 80% sequence identity with the amino acid sequence of SEQ ID NO: 38 (L2K). In some embodiments, the antigen-binding domain that binds the protein associated with the TCR complex comprises an amino acid sequence having at least 85% sequence identity with the amino acid sequence of SEQ ID NO: 38 (L2K). In some embodiments, the antigen-binding domain that binds the protein associated with the TCR complex comprises an amino acid sequence having at least 90% sequence identity with the amino acid sequence of SEQ ID NO: 38 (L2K). In some embodiments, the antigen-binding domain that binds the protein associated with the TCR complex comprises an amino acid sequence having at least 95% sequence identity with the amino acid sequence of SEQ ID NO: 38 (L2K). In some embodiments, the antigen-binding domain that binds the protein associated with the TCR complex comprises an amino acid sequence having at least 96% sequence identity with the amino acid sequence of SEQ ID NO: 38 (L2K). In some embodiments, the antigen-binding domain that binds the protein associated with the TCR complex comprises an amino acid sequence having at least 97% sequence identity with the amino acid sequence of SEQ ID NO: 38 (L2K). In some embodiments, the antigen-binding domain that binds the protein associated with the TCR complex comprises an amino acid sequence having at least 98% sequence identity with the amino acid sequence of SEQ ID NO: 38 (L2K). In some embodiments, the antigen-binding domain that binds the protein associated with the TCR complex comprises an amino acid sequence having at least 99% sequence identity with the amino acid sequence of SEQ ID NO: 38 (L2K). In some embodiments, the antigen-binding domain that binds the protein associated with the TCR complex comprises the amino acid sequence of SEQ ID NO: 38 (L2K). In some embodiments, the CDR sequences of the antigen-binding domain that binds the protein associated with the TCR complex have 100% identity with the CDR sequences of the amino acid sequence of SEQ ID NO: 38 (L2K) (i.e., the antigen-binding domain that binds the protein associated with the TCR complex comprises an amino acid sequence comprising a CDRH1, CDRH2, CDRH3, CDRL1, CDRL2, and CDRL3, each having 100% identity to the corresponding CDR in the amino acid sequence of SEQ ID NO: 38 (L2K). In some embodiments, the CDR sequences of the antigen-binding domain that binds the protein associated with the TCR complex have 100% identity with the CDR sequences of the amino acid sequence of SEQ ID NO: 38 (L2K), and the non-CDR (e.g., framework) sequences of the antigen-binding domain that binds the protein associated with the TCR complex have at least 80% sequence identity with the non-CDR (e.g., framework) sequences of the amino acid sequence of SEQ ID NO: 38 (L2K). In some embodiments, the CDR sequences of the antigen-binding domain that binds the protein associated with the TCR complex have 100% identity with the CDR sequences of the amino acid sequence of SEQ ID NO: 38 (L2K), and the non-CDR (e.g., framework) sequences of the antigen-binding domain that binds the protein associated with the TCR complex have at least 85% sequence identity with the non-CDR (e.g., framework) sequences of the amino acid sequence of SEQ ID NO: 38 (L2K). In some embodiments, the CDR sequences of the antigen-binding domain that binds the protein associated with the TCR complex have 100% identity with the CDR sequences of the amino acid sequence of SEQ ID NO: 38 (L2K), and the non-CDR (e.g., framework) sequences of the antigen-binding domain that binds the protein associated with the TCR complex have at least 90% sequence identity with the non-CDR (e.g., framework) sequences of the amino acid sequence of SEQ ID NO: 38 (L2K). In some embodiments, the CDR sequences of the antigen-binding domain that binds the protein associated with the TCR complex have 100% identity with the CDR sequences of the amino acid sequence of SEQ ID NO: 38 (L2K), and the non-CDR (e.g., framework) sequences of the antigen-binding domain that binds the protein associated with the TCR complex have at least 95% sequence identity with the non-CDR (e.g., framework) sequences of the amino acid sequence of SEQ ID NO: 38 (L2K). In some embodiments, the CDR sequences of the antigen-binding domain that binds the protein associated with the TCR complex have 100% identity with the CDR sequences of the amino acid sequence of SEQ ID NO: 38 (L2K), and the non-CDR (e.g., framework) sequences of the antigen-binding domain that binds the protein associated with the TCR complex have at least 96% sequence identity with the non-CDR (e.g., framework) sequences of the amino acid sequence of SEQ ID NO: 38 (L2K). In some embodiments, the CDR sequences of the antigen-binding domain that binds the protein associated with the TCR complex have 100% identity with the CDR sequences of the amino acid sequence of SEQ ID NO: 38 (L2K), and the non-CDR (e.g., framework) sequences of the antigen-binding domain that binds the protein associated with the TCR complex have at least 97% sequence identity with the non-CDR (e.g., framework) sequences of the amino acid sequence of SEQ ID NO: 38 (L2K). In some embodiments, the CDR sequences of the antigen-binding domain that binds the protein associated with the TCR complex have 100% identity with the CDR sequences of the amino acid sequence of SEQ ID NO: 38 (L2K), and the non-CDR (e.g., framework) sequences of the antigen-binding domain that binds the protein associated with the TCR complex have at least 98% sequence identity with the non-CDR (e.g., framework) sequences of the amino acid sequence of SEQ ID NO: 38 (L2K). In some embodiments, the CDR sequences of the antigen-binding domain that binds the protein associated with the TCR complex have 100% identity with the CDR sequences of the amino acid sequence of SEQ ID NO: 38 (L2K), and the non-CDR (e.g., framework) sequences of the antigen-binding domain that binds the protein associated with the TCR complex have at least 99% sequence identity with the non-CDR (e.g., framework) sequences of the amino acid sequence of SEQ ID NO: 38 (L2K).

[0076] Amino acid and nucleotide sequences of exemplary antigen-binding domains that bind a protein associated with the TCR complex are provided in Table 1.

TABLE 1
Table of Sequences

| SEQ ID NO | Description | Nucleotide/Amino Acid |
|---|---|---|
| SEQ ID NO: 31 | UCHT1¹ | Nucleotide |
| SEQ ID NO: 32 | UCHT1² | Amino Acid |
| SEQ ID NO: 33 | OKT3 | Nucleotide |
| SEQ ID NO: 34 | OKT3 | Amino Acid |
| SEQ ID NO: 35 | F6A | Nucleotide |
| SEQ ID NO: 36 | F6A | Amino Acid |
| SEQ ID NO: 37 | L2K | Nucleotide |
| SEQ ID NO: 38 | L2K | Amino Acid |
| SEQ ID NO: 39 | huUCHT1 | Nucleotide |
| SEQ ID NO: 40 | huUCHT1 | Amino Acid |
| SEQ ID NO: 41 | huUCHT1 (Y177T) | Nucleotide |
| SEQ ID NO: 42 | huUCHT1 (Y177T) | Amino Acid |
| SEQ ID NO: 43 | UCHT1 (Y182T) | Nucleotide |
| SEQ ID NO: 44 | UCHT1 (Y182T) | Amino Acid |

¹Light chain, nucleotides 1-324; Linker, nucleotides 325-387; Heavy chain, nucleotides 388-750
²Light chain, amino acids 1-108; Linker, amino acids 109-128; Heavy chain, amino acids 129-250

### Transmembrane Domain and Cytosolic Domain

[0077] In some embodiments, a GUCY2C T cell antigen coupler polypeptide comprises a T cell receptor signaling domain polypeptide. In some embodiments, a GUCY2C T cell antigen coupler polypeptide comprises a transmembrane domain of a TCR signaling domain. In some embodiments, a GUCY2C T cell antigen coupler polypeptide comprises a cytosolic domain of a TCR signaling domain polypeptide. In some embodiments, a GUCY2C T cell antigen coupler polypeptide comprises a transmembrane domain and a cytosolic domain of a TCR signaling domain polypeptide.

[0078] In some embodiments, the T cell receptor signaling domain polypeptide comprises a TCR co-receptor domain. In some embodiments, the TCR signaling domain polypeptide comprises a transmembrane domain and/or a cytosolic domain of a TCR co-receptor. In some embodiments, the TCR co-receptor is CD4, CD8, LAG3, or a chimeric variation thereof.

[0079] In some embodiments, the TCR co-receptor is CD4. In some embodiments, the GUCY2C TAC comprises a transmembrane domain and a cytosolic domain of a CD4 co-receptor. In some embodiments, the polynucleotide encoding the cytosolic and transmembrane domain comprises a nucleotide sequence having at least 70% sequence identity with the nucleotide sequence of SEQ ID NO: 45 (CD4 transmembrane and cytosolic domain). In some embodiments, the polynucleotide encoding the cytosolic and transmembrane domain comprises a nucleotide sequence having at least 75% sequence identity with the nucleotide sequence of SEQ ID NO: 45 (CD4 transmembrane and cytosolic domain). In some embodiments, the polynucleotide encoding the cytosolic and transmembrane domain comprises a nucleotide sequence having at least 80% sequence identity with the nucleotide sequence of SEQ ID NO: 45 (CD4 transmembrane and cytosolic domain). In some embodiments, the polynucleotide encoding the cytosolic and transmembrane domain comprises a nucleotide sequence having at least 85% sequence identity with the nucleotide sequence of SEQ ID NO: 45 (CD4 transmembrane and cytosolic domain). In some embodiments, the polynucleotide encoding the cytosolic and transmembrane domain comprises a nucleotide sequence having at least 90% sequence identity with the nucleotide sequence of SEQ ID NO: 45 (CD4 transmembrane and cytosolic domain). In some embodiments, the polynucleotide encoding the cytosolic and transmembrane domain comprises a nucleotide sequence having at least 95% sequence identity with the nucleotide sequence of SEQ ID NO: 45 (CD4 transmembrane and cytosolic domain). In some embodiments, the polynucleotide encoding the cytosolic and transmembrane domain comprises a nucleotide sequence having at least 96% sequence identity with the nucleotide sequence of SEQ ID NO: 45 (CD4 transmembrane and cytosolic domain). In some embodiments, the polynucleotide encoding the cytosolic and transmembrane domain comprises a nucleotide sequence having at least 97% sequence identity with the nucleotide sequence of SEQ ID NO: 45 (CD4 transmembrane and cytosolic domain). In some embodiments, the polynucleotide encoding the cytosolic and transmembrane domain comprises a nucleotide sequence having at least 98% sequence identity with the nucleotide sequence of SEQ ID NO: 45 (CD4 transmembrane and cytosolic domain). In some embodiments, the polynucleotide encoding the cytosolic and transmembrane domain comprises a nucleotide sequence having at least 99% sequence identity with the nucleotide sequence of SEQ ID NO: 45 (CD4 transmembrane and cytosolic domain). In some embodiments, the polynucleotide encoding the cytosolic and transmembrane domain comprises the nucleotide sequence of SEQ ID NO: 45 (CD4 transmembrane and cytosolic domain). In some embodiments, the cytosolic and transmembrane domain comprise an amino acid sequence having at least 70% sequence identity with the amino acid sequence of SEQ ID NO: 46 (CD4 transmembrane and cytosolic domain). In some embodiments, the cytosolic and transmembrane domain comprise an amino acid sequence having at least 75% sequence identity with the amino acid sequence of SEQ ID NO: 46 (CD4 transmembrane and cytosolic domain). In some embodiments, the cytosolic and transmembrane domain comprise an amino acid sequence having at least 80% sequence identity with the amino acid sequence of SEQ ID NO: 46 (CD4 transmembrane and cytosolic domain). In some embodiments, the cytosolic and transmembrane domain comprise an amino acid sequence having at least 85% sequence identity with the amino acid sequence of SEQ ID NO: 46 (CD4 transmembrane and cytosolic domain). In some embodiments, the cytosolic and transmembrane domain comprise an amino acid sequence having at least 90% sequence identity with the amino acid sequence of SEQ ID NO: 46 (CD4 transmembrane and cytosolic domain). In some embodiments, the cytosolic and transmembrane domain comprise an amino acid sequence having at least 95% sequence identity with the amino acid sequence of SEQ ID NO: 46 (CD4 transmembrane and cytosolic domain). In some embodiments, the cytosolic and transmembrane domain comprise an amino acid sequence having at least 96% sequence identity with the amino acid sequence of SEQ ID NO: 46 (CD4 transmembrane and cytosolic domain). In some embodiments, the cytosolic and transmembrane domain comprise an amino acid sequence having at least 97% sequence identity with the amino acid sequence of SEQ ID NO: 46 (CD4 transmembrane and cytosolic domain). In some embodiments, the cytosolic and transmembrane domain comprise an amino acid sequence having at least 98% sequence identity with the amino acid sequence of SEQ ID NO: 46 (CD4 transmembrane and cytosolic domain). In some embodiments, the cytosolic and transmembrane domain comprise an amino acid sequence having at least 99% sequence identity with the amino acid sequence of SEQ ID NO: 46 (CD4 transmembrane and cytosolic domain). In some embodiments, the cytosolic and transmembrane domain comprise the amino acid sequence of SEQ ID NO: 46 (CD4 transmembrane and cytosolic domain).

[0080] In some embodiments, the TCR co-receptor is CD8. In some embodiments, the TCR co-receptor is CD8a. In some embodiments, the polynucleotide encoding the cytosolic and transmembrane domain comprises a nucleotide sequence having at least 70% sequence identity with the nucleotide sequence of SEQ ID NO: 47 (CD8 transmembrane and cytosolic domain). In some embodiments, the polynucleotide encoding the cytosolic and transmembrane domain comprises a nucleotide sequence having at least 75% sequence identity with the nucleotide sequence of SEQ ID NO: 47 (CD8 transmembrane and cytosolic domain). In some embodiments, the polynucleotide encoding the cytosolic and transmembrane domain comprises a nucleotide sequence having at least 80% sequence identity with the nucleotide sequence of SEQ ID NO: 47 (CD8 transmembrane and cytosolic domain). In some embodiments, the polynucleotide encoding the cytosolic and transmembrane domain comprises a nucleotide sequence having at least 85% sequence identity with the nucleotide sequence of SEQ ID NO: 47 (CD8 transmembrane and cytosolic domain). In some embodiments, the polynucleotide encoding the cytosolic and transmembrane domain comprises a nucleotide sequence having at least 90% sequence identity with the nucleotide sequence of SEQ ID NO: 47 (CD8 transmembrane and cytosolic domain). In some embodiments, the polynucleotide encoding the cytosolic and transmembrane domain comprises a nucleotide sequence having at least 95% sequence identity with the nucleotide sequence of SEQ ID NO: 47 (CD8 transmembrane and cytosolic domain). In some embodiments, the polynucleotide encoding the cytosolic and transmembrane domain comprises a nucleotide sequence having at least 96% sequence identity with the nucleotide sequence of SEQ ID NO: 47 (CD8 transmembrane and cytosolic domain). In some embodiments, the polynucleotide encoding the cytosolic and transmembrane domain comprises a nucleotide sequence having at least 97% sequence identity with the nucleotide sequence of SEQ ID NO: 47 (CD8 transmembrane and cytosolic domain). In some embodiments, the polynucleotide encoding the cytosolic and transmembrane domain comprises a nucleotide sequence having at least 98% sequence identity with the nucleotide sequence of SEQ ID NO: 47 (CD8 transmembrane and cytosolic domain). In some embodiments, the polynucleotide encoding the cytosolic and transmembrane domain comprises a nucleotide sequence having at least 99% sequence identity with the nucleotide sequence of SEQ ID NO: 47 (CD8 transmembrane and cytosolic domain). In some embodiments, the polynucleotide encoding the cytosolic and transmembrane domain comprises the nucleotide sequence of SEQ ID NO: 47 (CD8 transmembrane and cytosolic domain). In some embodiments, the cytosolic and transmembrane domain comprise an amino acid sequence having at least 70% sequence identity with the amino acid sequence of SEQ ID NO: 48 (CD8 transmembrane and cytosolic domain). In some embodiments, the cytosolic and transmembrane domain comprise an amino acid sequence having at least 75% sequence identity with the amino acid sequence of SEQ ID NO: 48 (CD8 transmembrane and cytosolic domain). In some embodiments, the cytosolic and transmembrane domain comprise an amino acid sequence having at least 80% sequence identity with the amino acid sequence of SEQ ID NO: 48 (CD8 transmembrane and cytosolic domain). In some embodiments, the cytosolic and transmembrane domain comprise an amino acid sequence having at least 85% sequence identity with the amino acid sequence of SEQ ID NO: 48 (CD8 transmembrane and cytosolic domain). In some embodiments, the cytosolic and transmembrane domain comprise an amino acid sequence having at least 90% sequence identity with the amino acid sequence of SEQ ID NO: 48 (CD8 transmembrane and cytosolic domain). In some embodiments, the cytosolic and transmembrane domain comprise an amino acid sequence having at least 95% sequence identity with the amino acid sequence of SEQ ID NO: 48 (CD8 transmembrane and cytosolic domain). In some embodiments, the cytosolic and transmembrane domain comprise an amino acid sequence having at least 96% sequence identity with the amino acid sequence of SEQ ID NO: 48 (CD8 transmembrane and cytosolic domain). In some embodiments, the cytosolic and transmembrane domain comprise an amino acid sequence having at least 97% sequence identity with the amino acid sequence of SEQ ID NO: 48 (CD8 transmembrane and cytosolic domain). In some embodiments, the cytosolic and transmembrane domain comprise an amino acid sequence having at least 98% sequence identity with the amino acid sequence of SEQ ID NO: 48 (CD8 transmembrane and cytosolic domain). In some embodiments, the cytosolic and transmembrane domain comprise an amino acid sequence having at least 99% sequence identity with the amino acid sequence of SEQ ID NO: 48 (CD8 transmembrane and cytosolic domain). In some embodiments, the cytosolic and transmembrane domain comprise the amino acid sequence of SEQ ID NO: 48 (CD8 transmembrane and cytosolic domain).

[0081] In some embodiments, the TCR signaling domain polypeptide comprises a chimera of sequences or domains from co-receptors. In some embodiments, the TCR signaling domain polypeptide comprises a chimera of CD8α and CD8β, wherein the CD8α arginine rich region is replaced with the CD8β arginine rich region (CD8α+R(β) chimera). In some embodiments, the polynucleotide encoding the cytosolic and transmembrane domain comprises a nucleotide sequence having at least 70% sequence identity with the nucleotide sequence of SEQ ID NO: 49 (CD8α+R(β) chimera). In some embodiments, the polynucleotide encoding the cytosolic and transmembrane domain comprises a nucleotide sequence having at least 75% sequence identity with the nucleotide sequence of SEQ ID NO: 49 (CD8α+R(β) chimera). In some embodiments, the polynucleotide encoding the cytosolic and transmembrane domain comprises a nucleotide sequence having at least 80% sequence identity with the nucleotide sequence of SEQ ID NO: 49 (CD8α+R(β) chimera). In some embodiments, the polynucleotide encoding the cytosolic and transmembrane domain comprises a nucleotide sequence having at least 85% sequence identity with the nucleotide sequence of SEQ ID NO: 49 (CD8α+R(β) chimera). In some embodiments, the polynucleotide encoding the cytosolic and transmembrane domain comprises a nucleotide sequence having at least 90% sequence identity with the nucleotide sequence of SEQ ID NO: 49 (CD8α+R(β) chimera). In some embodiments, the polynucleotide encoding the cytosolic and transmembrane domain comprises a nucleotide sequence having at least 95% sequence identity with the nucleotide sequence of SEQ ID NO: 49 (CD8α+R(β) chimera). In some embodiments, the polynucleotide encoding the cytosolic and transmembrane domain comprises a nucleotide sequence having at least 96% sequence identity with the nucleotide sequence of SEQ ID NO: 49 (CD8α+R(β) chimera). In some embodiments, the polynucleotide encoding the cytosolic and transmembrane domain comprises a nucleotide sequence having at least 97% sequence identity with the nucleotide sequence of SEQ ID NO: 49 (CD8α+R(β) chimera). In some embodiments, the polynucleotide encoding the cytosolic and transmembrane domain comprises a nucleotide sequence having at least 98% sequence identity with the nucleotide sequence of SEQ ID NO: 49 (CD8α+R(β) chimera). In some embodiments, the polynucleotide encoding the cytosolic and transmembrane domain comprises a nucleotide sequence having at least 99% sequence identity with the nucleotide sequence of SEQ ID NO: 49 (CD8α+R(β) chimera). In some embodiments, the polynucleotide encoding the cytosolic and transmembrane domain comprises the nucleotide sequence of SEQ ID NO: 49 (CD8α+R(β) chimera). In some embodiments, the cytosolic and transmembrane domain comprise an amino acid sequence having at least 70% sequence identity with the amino acid sequence of SEQ ID NO: 50 (CD8α+R(β) chimera). In some embodiments, the cytosolic and transmembrane domain comprise an amino acid sequence having at least 75% sequence identity with the amino acid sequence of SEQ ID NO: 50 (CD8α+R(β) chimera). In some embodiments, the cytosolic and transmembrane domain comprise an amino acid sequence having at least 80% sequence identity with the amino acid sequence of SEQ ID NO: 50 (CD8α+R(β) chimera). In some embodiments, the cytosolic and transmembrane domain comprise an amino acid sequence having at least 85% sequence identity with the amino acid sequence of SEQ ID NO: 50 (CD8α+R(β) chimera). In some embodiments, the cytosolic and transmembrane domain comprise an amino acid sequence having at least 90% sequence identity with the amino acid sequence of SEQ ID NO: 50 (CD8α+R(β) chimera). In some embodiments, the cytosolic and transmembrane domain comprise an amino acid sequence having at least 95% sequence identity with the amino acid sequence of SEQ ID NO: 50 (CD8α+R(β) chimera). In some embodiments, the cytosolic and transmembrane domain comprise an amino acid sequence having at least 96% sequence identity with the amino acid sequence of SEQ ID NO: 50 (CD8α+R(β) chimera). In some embodiments, the cytosolic and transmembrane domain comprise an amino acid sequence having at least 97% sequence identity with the amino acid sequence of SEQ ID NO: 50 (CD8α+R(β) chimera). In some embodiments, the cytosolic and transmembrane domain comprise an amino acid sequence having at least 98% sequence identity with the amino acid sequence of SEQ ID NO: 50 (CD8α+R(β) chimera). In some embodiments, the cytosolic and transmembrane domain comprise an amino acid sequence having at least 99% sequence identity with the amino acid sequence of SEQ ID NO: 50 (CD8α+R(β) chimera). In some embodiments, the cytosolic and transmembrane domain comprise the amino acid sequence of SEQ ID NO: 50 (CD8α+R(β) chimera).

[0082] In some embodiments, the TCR signaling domain polypeptide comprises a chimera of CD8α and CD8β, where the CD8α CXCP domain, which contains an Lck binding motif, is appended to the C-terminus of the CD8β cytosolic domain (CD8β+Lck chimera). In some embodiments, the polynucleotide encoding the cytosolic and transmembrane domain comprises a nucleotide sequence having at least 70% sequence identity with the nucleotide sequence of SEQ ID NO: 51 (CD8β+Lck chimera). In some embodiments, the polynucleotide encoding the cytosolic and transmembrane domain comprises a nucleotide sequence having at least 75% sequence identity with the nucleotide sequence of SEQ ID NO: 51 (CD8β+Lck chimera). In some embodiments, the polynucleotide encoding the cytosolic and transmembrane domain comprises a nucleotide sequence having at least 80% sequence identity with the nucleotide sequence of SEQ ID NO: 51 (CD8β+Lck chimera). In some embodiments, the polynucleotide encoding the cytosolic and transmembrane domain comprises a nucleotide sequence having at least 85% sequence identity with the nucleotide sequence of SEQ ID NO: 51 (CD8β+Lck chimera). In some embodiments, the polynucleotide encoding the cytosolic and transmembrane domain comprises a nucleotide sequence having at least 90% sequence identity with the nucleotide sequence of SEQ ID NO: 51 (CD8β+Lck chimera). In some embodiments, the polynucleotide encoding the cytosolic and transmembrane domain comprises a nucleotide sequence having at least 95% sequence identity with the nucleotide sequence of SEQ ID NO: 51 (CD8β+Lck chimera). In some embodiments, the polynucleotide encoding the cytosolic and transmembrane domain comprises a nucleotide sequence having at least 96% sequence identity with the nucleotide sequence of SEQ ID NO: 51 (CD8β+Lck chimera). In some embodiments, the polynucleotide encoding the cytosolic and transmembrane domain comprises a nucleotide sequence having at least 97% sequence identity with the nucleotide sequence of SEQ ID NO: 51 (CD8β+Lck chimera). In some embodiments, the polynucleotide encoding the cytosolic and transmembrane domain comprises a nucleotide sequence having at least 98% sequence identity with the nucleotide sequence of SEQ ID NO: 51 (CD8β+Lck chimera). In some embodiments, the polynucleotide encoding the cytosolic and transmembrane domain comprises a nucleotide sequence having at least 99% sequence identity with the nucleotide sequence of SEQ ID NO: 51 (CD8β+Lck chimera). In some embodiments, the polynucleotide encoding the cytosolic and transmembrane domain comprises the nucleotide sequence of SEQ ID NO: 51 (CD8β+Lck chimera). In some embodiments, the cytosolic and transmembrane domain comprise an amino acid sequence having at least 70% sequence identity with the amino acid sequence of SEQ ID NO: 52 (CD8β+Lck chimera). In some embodiments, the cytosolic and transmembrane domain comprise an amino acid sequence having at least 75% sequence identity with the amino acid sequence of SEQ ID NO: 52 (CD8β+Lck chimera). In some embodiments, the cytosolic and transmembrane domain comprise an amino acid sequence having at least 80% sequence identity with the amino acid sequence of SEQ ID NO: 52 (CD8β+Lck chimera). In some embodiments, the cytosolic and transmembrane domain comprise an amino acid sequence having at least 85% sequence identity with the amino acid sequence of SEQ ID NO: 52 (CD8β+Lck chimera). In some embodiments, the cytosolic and transmembrane domain comprise an amino acid sequence having at least 90% sequence identity with the amino acid sequence of SEQ ID NO: 52 (CD8β+Lck chimera). In some embodiments, the cytosolic and transmembrane domain comprise an amino acid sequence having at least 95% sequence identity with the amino acid sequence of SEQ ID NO: 52 (CD8β+Lck chimera). In some embodiments, the cytosolic and transmembrane domain comprise an amino acid sequence having at least 96% sequence identity with the amino acid sequence of SEQ ID NO: 52 (CD8β+Lck chimera). In some embodiments, the cytosolic and transmembrane domain comprise an amino acid sequence having at least 97% sequence identity with the amino acid sequence of SEQ ID NO: 52 (CD8β+Lck chimera). In some embodiments, the cytosolic and transmembrane domain comprise an amino acid sequence having at least 98% sequence identity with the amino acid sequence of SEQ ID NO: 52 (CD8β+Lck chimera). In some embodiments, the cytosolic and transmembrane domain comprise an amino acid sequence having at least 99% sequence identity with the amino acid sequence of SEQ ID NO: 52 (CD8β+Lck chimera). In some embodiments, the cytosolic and transmembrane domain comprise the amino acid sequence of SEQ ID NO: 52 (CD8β+Lck chimera).

[0083] In some embodiments, the TCR signaling domain polypeptide includes both a cytosolic domain and a transmembrane domain of a TCR co-receptor protein. In some embodiments, the cytosolic domain and transmembrane domain are from the same co-receptor or from different co-receptors.

[0084] Amino acid and nucleotide sequences of exemplary transmembrane and cytosolic domains are provided in Table 2.

TABLE 2
Table of Sequences

| SEQ ID NO | Description | Nucleotide/Amino Acid |
|---|---|---|
| SEQ ID NO: 45 | CD4 Domain¹ | Nucleotide |
| SEQ ID NO: 46 | CD4 Domain² | Amino Acid |
| SEQ ID NO: 47 | CD8α Domain | Nucleotide |
| SEQ ID NO: 48 | CD8α Domain | Amino Acid |
| SEQ ID NO: 49 | CD8α + R(β) Domain | Nucleotide |
| SEQ ID NO: 50 | CD8α + R(β) Domain | Amino Acid |
| SEQ ID NO: 51 | CD8 α + Lck Domain | Nucleotide |
| SEQ ID NO: 52 | CD8 α + Lck Domain | Amino Acid |

¹Extracellular linker, nucleotides 1-66; Transmembrane domain, nucleotides 67-132; Cytosolic domain, nucleotides 133-254
²Extracellular linker, amino acids 1-22; Transmembrane domain, amino acids 23-44; Cytosolic domain, amino acids 45-84

### Configurations, Linkers, and Connectors

[0085] In some embodiments, a nucleic acid disclosed herein is in an order of (1) a first polynucleotide encoding an antigen-binding domain that binds GUCY2C; (2) a second polynucleotide encoding an antigen-binding domain that binds a TCR complex; (3) a third polynucleotide encoding a transmembrane domain and a cytosolic domain. In some embodiments, a nucleic acid disclosed herein is in an order of (1) a first polynucleotide encoding an antigen-binding domain that binds GUCY2C; (2) a second polynucleotide encoding an antigen-binding domain that binds a TCR complex; (3) a third polynucleotide encoding a transmembrane domain and a cytosolic domain, wherein the order is 5′ end to 3′ end. In some embodiments, a nucleic acid disclosed herein is in an order of (1) a first polynucleotide encoding an antigen-binding domain that binds GUCY2C; (2) a second polynucleotide encoding an antigen-binding domain that binds a TCR complex; (3) a third polynucleotide encoding a transmembrane domain and a cytosolic domain, wherein the order is 3′ end to 5′ end. In some embodiments, a nucleic acid described herein is in an order of (1) a first polynucleotide encoding an antigen-binding domain that binds a TCR complex; (2) a second polynucleotide encoding an antigen-binding domain that binds GUCY2C; (3) a third polynucleotide encoding a transmembrane domain and a cytosolic domain. In some embodiments, a nucleic acid described herein is in an order of (1) a first polynucleotide encoding an antigen-binding domain that binds a TCR complex; (2) a second polynucleotide encoding an antigen-binding domain that binds GUCY2C; (3) a third polynucleotide encoding a transmembrane domain and a cytosolic domain, wherein the order is 5′ end to 3′ end. In some embodiments, a nucleic acid described herein is in an order of (1) a first polynucleotide encoding an antigen-binding domain that binds a TCR complex; (2) a second polynucleotide encoding an antigen-binding domain that binds GUCY2C; (3) a third polynucleotide encoding a transmembrane domain and a cytosolic domain, wherein the order is 3′ end to 5′ end.

[0086] In some embodiments, a GUCY2C TAC polypeptide disclosed herein is in an order of (1) an antigen-binding domain that binds GUCY2C; (2) an antigen-binding domain that binds a TCR complex; (3) a transmembrane domain and a cytosolic domain, wherein the order is N-terminus to C-terminus. In some embodiments, a GUCY2C TAC polypeptide disclosed herein is in an order of (1) an antigen-binding domain that binds GUCY2C; (2) an antigen-binding domain that binds a TCR complex; (3) a transmembrane domain and a cytosolic domain, wherein the order is C-terminus to N-terminus. In some embodiments, a GUCY2C TAC polypeptide described herein is in an order of (1) an antigen-binding domain that binds a TCR complex; (2) an antigen-binding domain that binds GUCY2C; (3) a transmembrane domain and a cytosolic domain, wherein the order is N-terminus to C-terminus. In some embodiments, a GUCY2C TAC polypeptide described herein is in an order of (1) an antigen-binding domain that binds a TCR complex; (2) an antigen-binding domain that binds GUCY2C; (3) a transmembrane domain and a cytosolic domain, wherein the order is C-terminus to N-terminus.

[0087] In some embodiments, the antigen-binding domain that binds GUCY2C, the antigen-binding domain that binds the TCR complex, and/or the transmembrane domain and cytosolic domain are directly fused. For example, the antigen-binding domain that binds GUCY2C and the transmembrane domain and cytosolic domain are both fused to the antigen-binding domain that binds the TCR complex. In some embodiments, the antigen-binding domain that binds GUCY2C, the antigen-binding domain that binds the TCR complex, and/or the transmembrane domain and cytosolic domain are joined by at least one linker. In some embodiments, the antigen-binding domain that binds GUCY2C and the antigen-binding domain that binds the TCR complex are directly fused, and joined to the transmembrane domain and cytosolic domain by a linker. In some embodiments, the antigen-binding domain that binds the TCR complex and the transmembrane domain and cytosolic domain are directly fused, and joined to the antigen-binding domain that binds GUCY2C by a linker.

[0088] In some embodiments, the linker is a peptide linker. In some embodiments, the peptide linker comprises 1 to 40 amino acids. In some embodiments, the peptide linker comprises 1 to 30 amino acids. In some embodiments, the peptide linker comprises 1 to 15 amino acids. In some embodiments, the peptide linker comprises 1 to 10 amino acids. In some embodiments, the peptide linker comprises 1 to 6 amino acids. In some embodiments, the peptide linker comprises 30 to 40 amino acids. In some embodiments, the peptide linker comprises 32 to 36 amino acids. In some embodiments, the peptide linker comprises 5 to 30 amino acids. In some embodiments, the peptide linker comprises 5 amino acids. In some embodiments, the peptide linker comprises 10 amino acids. In some embodiments, the peptide linker comprises 15 amino acids. In some embodiments, the peptide linker comprises 20 amino acids. In some embodiments, the peptide linker comprises 25 amino acids. In some embodiments, the peptide linker comprises 30 amino acids. In some embodiments, the peptide linker comprises a glycine and/or serine-rich linker.

[0089] In some embodiments, the at least one linker comprises an amino acid sequence having at least 80% identity with the amino acid sequence of SEQ ID NO: 26 ((G4S)4-based linker), SEQ ID NO: 28 (G4S-based linker), SEQ ID NO: 6 (linker 1), SEQ ID NO: 8 (linker 2), SEQ ID NO: 10 (CD4 based linker), SEQ ID NO: 12 (short helix connector), SEQ ID NO: 14 (long helix connector), SEQ ID NO: 16 (large domain connector), or SEQ ID NO: 24 (G4S3 linker). In some embodiments, the at least one linker comprises an amino acid sequence having at least 85% identity with the amino acid sequence of SEQ ID NO: 26 ((G4S)4-based linker), SEQ ID NO: 28 (G4S-based linker), SEQ ID NO: 6 (linker 1), SEQ ID NO: 8 (linker 2), SEQ ID NO: 10 (CD4 based linker), SEQ ID NO: 12 (short helix connector), SEQ ID NO: 14 (long helix connector), SEQ ID NO: 16 (large domain connector), or SEQ ID NO: 24 (G4S3 linker). In some embodiments, the at least one linker comprises an amino acid sequence having at least 90% identity with the amino acid sequence of SEQ ID NO: 26 ((G4S)4-based linker), SEQ ID NO: 28 (G4S-based linker), SEQ ID NO: 6 (linker 1), SEQ ID NO: 8 (linker 2), SEQ ID NO: 10 (CD4 based linker), SEQ ID NO: 12 (short helix connector), SEQ ID NO: 14 (long helix connector), SEQ ID NO: 16 (large domain connector), or SEQ ID NO: 24 (G4S3 linker). In some embodiments, the at least one linker comprises an amino acid sequence having at least 95% identity with the amino acid sequence of SEQ ID NO: 26 ((G4S)4-based linker), SEQ ID NO: 28 (G4S-based linker), SEQ ID NO: 6 (linker 1), SEQ ID NO: 8 (linker 2), SEQ ID NO: 10 (CD4 based linker), SEQ ID NO: 12 (short helix connector), SEQ ID NO: 14 (long helix connector), SEQ ID NO: 16 (large domain connector), or SEQ ID NO: 24 (G4S3 linker). In some embodiments, the at least one linker comprises an amino acid sequence having at least 96% identity with the amino acid sequence of SEQ ID NO: 26 ((G4S)4-based linker), SEQ ID NO: 28 (G4S-based linker), SEQ ID NO: 6 (linker 1), SEQ ID NO: 8 (linker 2), SEQ ID NO: 10 (CD4 based linker), SEQ ID NO: 12 (short helix connector), SEQ ID NO: 14 (long helix connector), SEQ ID NO: 16 (large domain connector), or SEQ ID NO: 24 (G4S3 linker). In some embodiments, the at least one linker comprises an amino acid sequence having at least 97% identity with the amino acid sequence of SEQ ID NO: 26 ((G4S)4-based linker), SEQ ID NO: 28 (G4S-based linker), SEQ ID NO: 6 (linker 1), SEQ ID NO: 8 (linker 2), SEQ ID NO: 10 (CD4 based linker), SEQ ID NO: 12 (short helix connector), SEQ ID NO: 14 (long helix connector), SEQ ID NO: 16 (large domain connector), or SEQ ID NO: 24 (G4S3 linker). In some embodiments, the at least one linker comprises an amino acid sequence having at least 98% identity with the amino acid sequence of SEQ ID NO: 26 ((G4S)4-based linker), SEQ ID NO: 28 (G4S-based linker), SEQ ID NO: 6 (linker 1), SEQ ID NO: 8 (linker 2), SEQ ID NO: 10 (CD4 based linker), SEQ ID NO: 12 (short helix connector), SEQ ID NO: 14 (long helix connector), SEQ ID NO: 16 (large domain connector), or SEQ ID NO: 24 (G4S3 linker). In some embodiments, the at least one linker comprises an amino acid sequence having at least 99% identity with the amino acid sequence of SEQ ID NO: 26 ((G4S)4-based linker), SEQ ID NO: 28 (G4S-based linker), SEQ ID NO: 6 (linker 1), SEQ ID NO: 8 (linker 2), SEQ ID NO: 10 (CD4 based linker), SEQ ID NO: 12 (short helix connector), SEQ ID NO: 14 (long helix connector), SEQ ID NO: 16 (large domain connector), or SEQ ID NO: 24 (G4S3 linker). In some embodiments, the at least one linker comprises the amino acid sequence of SEQ ID NO: 26 ((G4S)4-based linker), SEQ ID NO: 28 (G4S-based linker), SEQ ID NO: 6 (linker 1), SEQ ID NO: 8 (linker 2), SEQ ID NO: 10 (CD4 based linker), SEQ ID NO: 12 (short helix connector), SEQ ID NO: 14 (long helix connector), SEQ ID NO: 16 (large domain connector), or SEQ ID NO: 24 (G4S3 linker).

[0090] In some embodiments, the peptide linker that joins the antigen-binding domain that binds GUCY2C to the antigen-binding domain that binds a TCR complex (e.g., UCHT1) is known as the connector to distinguish this protein domain from other linkers in the TAC. The connector may be of any size. In some embodiments, the connector between the antigen-binding domain that binds a TCR complex and the antigen-binding domain that binds GUCY2C is a short helix comprising SEQ ID NO: 12. In some embodiments, the connector between the antigen-binding domain that binds a TCR complex and the antigen-binding domain that binds GUCY2C is a short helix encoded by SEQ ID NO: 11. In some embodiments, the connector between the antigen-binding domain that binds a TCR complex and the antigen-binding domain that binds GUCY2C is a long helix comprising SEQ ID NO: 14. In some embodiments, the connector between the antigen-binding domain that binds a TCR complex and the antigen-binding domain that binds GUCY2C is a long helix encoded by SEQ ID NO: 13. In some embodiments, the connector between the antigen-binding domain that binds a TCR complex and the antigen-binding domain that binds GUCY2C is a large domain comprising SEQ ID NO: 16. In some embodiments, the connector between the antigen-binding domain that binds a TCR complex and the antigen-binding domain that binds GUCY2C is a large domain encoded by SEQ ID NO: 15.

[0091] In some embodiments, a nucleic acid or TAC disclosed herein comprises a leader sequence. In some embodiments, the leader sequence is encoded by a nucleotide sequence having at least 80% sequence identity with the nucleotide sequence of SEQ ID NO: 1 (muIgG leader), SEQ ID NO: 17 (huIgG leader), SEQ ID NO: 19 (huCD8α leader), or SEQ ID NO: 29 (huCD8α leader). In some embodiments, the leader sequence is encoded by a nucleotide sequence having at least 85% sequence identity with the nucleotide sequence of SEQ ID NO: 1 (muIgG leader), SEQ ID NO: 17 (huIgG leader), SEQ ID NO: 19 (huCD8α leader), or SEQ ID NO: 29 (huCD8α leader). In some embodiments, the leader sequence is encoded by a nucleotide sequence having at least 90% sequence identity with the nucleotide sequence of SEQ ID NO: 1 (muIgG leader), SEQ ID NO: 17 (huIgG leader), SEQ ID NO: 19 (huCD8α leader), or SEQ ID NO: 29 (huCD8α leader). In some embodiments, the leader sequence is encoded by a nucleotide sequence having at least 95% sequence identity with the nucleotide sequence of SEQ ID NO: 1 (muIgG leader), SEQ ID NO: 17 (huIgG leader), SEQ ID NO: 19 (huCD8α leader), or SEQ ID NO: 29 (huCD8α leader). In some embodiments, the leader sequence is encoded by a nucleotide sequence having at least 96% sequence identity with the nucleotide sequence of SEQ ID NO: 1 (muIgG leader), SEQ ID NO: 17 (huIgG leader), SEQ ID NO: 19 (huCD8α leader), or SEQ ID NO: 29 (huCD8α leader). In some embodiments, the leader sequence is encoded by a nucleotide sequence having at least 97% sequence identity with the nucleotide sequence of SEQ ID NO: 1 (muIgG leader), SEQ ID NO: 17 (huIgG leader), SEQ ID NO: 19 (huCD8α leader), or SEQ ID NO: 29 (huCD8α leader). In some embodiments, the leader sequence is encoded by a nucleotide sequence having at least 98% sequence identity with the nucleotide sequence of SEQ ID NO: 1 (muIgG leader), SEQ ID NO: 17 (huIgG leader), SEQ ID NO: 19 (huCD8α leader), or SEQ ID NO: 29 (huCD8α leader). In some embodiments, the leader sequence is encoded by a nucleotide sequence having at least 99% sequence identity with the nucleotide sequence of SEQ ID NO: 1 (muIgG leader), SEQ ID NO: 17 (huIgG leader), SEQ ID NO: 19 (huCD8α leader), or SEQ ID NO: 29 (huCD8α leader). In some embodiments, the leader sequence comprises the nucleotide sequence of SEQ ID NO: 1 (muIgG leader), SEQ ID NO: 17 (huIgG leader), SEQ ID NO: 19 (huCD8α leader), or SEQ ID NO: 29 (huCD8α leader).

[0092] In some embodiments, a nucleic acid or TAC disclosed herein comprises a leader sequence. In some embodiments, the leader sequence comprises an amino acid sequence having at least 80% sequence identity with the amino acid sequence of SEQ ID NO: 2 (muIgG leader), SEQ ID NO: 18 (huIgG leader), or SEQ ID NO: 20 (huCD8α leader). In some embodiments, the leader sequence comprises an amino acid sequence having at least 85% sequence identity with the amino acid sequence of SEQ ID NO: 2 (muIgG leader), SEQ ID NO: 18 (huIgG leader), or SEQ ID NO: 20 (huCD8α leader). In some embodiments, the leader sequence comprises an amino acid sequence having at least 90% sequence identity with the amino acid sequence of SEQ ID NO: 2 (muIgG leader), SEQ ID NO: 18 (huIgG leader), or SEQ ID NO: 20 (huCD8α leader). In some embodiments, the leader sequence comprises an amino acid sequence having at least 95% sequence identity with the amino acid sequence of SEQ ID NO: 2 (muIgG leader), SEQ ID NO: 18 (huIgG leader), or SEQ ID NO: 20 (huCD8α leader). In some embodiments, the leader sequence comprises an amino acid sequence having at least 96% sequence identity with the amino acid sequence of SEQ ID NO: 2 (muIgG leader), SEQ ID NO: 18 (huIgG leader), or SEQ ID NO: 20 (huCD8α leader). In some embodiments, the leader sequence comprises an amino acid sequence having at least 97% sequence identity with the amino acid sequence of SEQ ID NO: 2 (muIgG leader), SEQ ID NO: 18 (huIgG leader), or SEQ ID NO: 20 (huCD8α leader). In some embodiments, the leader sequence comprises an amino acid sequence having at least 98% sequence identity with the amino acid sequence of SEQ ID NO: 2 (muIgG leader), SEQ ID NO: 18 (huIgG leader), or SEQ ID NO: 20 (huCD8α leader). In some embodiments, the leader sequence comprises an amino acid sequence having at least 99% sequence identity with the amino acid sequence of SEQ ID NO: 2 (muIgG leader), SEQ ID NO: 18 (huIgG leader), or SEQ ID NO: 20 (huCD8α leader). In some embodiments, the leader sequence comprises the amino acid sequence of SEQ ID NO: 2 (muIgG leader), SEQ ID NO: 18 (huIgG leader), or SEQ ID NO: 20 (huCD8α leader).

[0093] In some embodiments, a GUCY2C T cell antigen coupler polypeptide comprises a tag, e.g., a Myc tag. In some embodiments, the tag comprises an amino acid sequence having at least 80% identity with the amino acid sequence of SEQ ID NO: 4 (Myc Tag). In some embodiments, the tag comprises an amino acid sequence having at least 85% identity with the amino acid sequence of SEQ ID NO: 4 (Myc Tag). In some embodiments, the tag comprises an amino acid sequence having at least 90% identity with the amino acid sequence of SEQ ID NO: 4 (Myc Tag). In some embodiments, the tag comprises an amino acid sequence having at least 95% identity with the amino acid sequence of SEQ ID NO: 4 (Myc Tag). In some embodiments, the tag comprises an amino acid sequence having at least 96% identity with the amino acid sequence of SEQ ID NO: 4 (Myc Tag). In some embodiments, the tag comprises an amino acid sequence having at least 97% identity with the amino acid sequence of SEQ ID NO: 4 (Myc Tag). In some embodiments, the tag comprises an amino acid sequence having at least 98% identity with the amino acid sequence of SEQ ID NO: 4 (Myc Tag). In some embodiments, the tag comprises an amino acid sequence having at least 99% identity with the amino acid sequence of SEQ ID NO: 4 (Myc Tag). In some embodiments, the tag comprises the amino acid sequence of SEQ ID NO: 4 (Myc Tag).

[0094] Amino acid and nucleotide sequences of exemplary linkers, connectors, tags, and leader sequences are provided in Table 3.

TABLE 3
Table of Sequences

| SEQ ID NO | Description | Nucleotide/Amino Acid |
|---|---|---|
| SEQ ID NO: 1 | muIgG leader (secretion signal) | Nucleotide |
| SEQ ID NO: 2 | muIgG leader (secretion signal) | Amino Acid |
| SEQ ID NO: 3 | Myc Tag | Nucleotide |
| SEQ ID NO: 4 | Myc Tag | Amino Acid |
| SEQ ID NO: 5 | Linker 1 | Nucleotide |
| SEQ ID NO: 6 | Linker 1 | Amino Acid |
| SEQ ID NO: 7 | Linker 2 | Nucleotide |
| SEQ ID NO: 8 | Linker 2 | Amino Acid |
| SEQ ID NO: 9 | CD4 linker | Nucleotide |
| SEQ ID NO: 10 | CD4 linker | Amino Acid |
| SEQ ID NO: 11 | Short Helix connector | Nucleotide |
| SEQ ID NO: 12 | Short Helix connector | Amino Acid |
| SEQ ID NO: 13 | Long Helix connector | Nucleotide |
| SEQ ID NO: 14 | Long Helix connector | Amino Acid |
| SEQ ID NO: 15 | Large domain connector | Nucleotide |
| SEQ ID NO: 16 | Large domain connector | Amino Acid |
| SEQ ID NO: 17 | huIgG | Nucleotide |
| SEQ ID NO: 18 | huIgG | Amino Acid |
| SEQ ID NO: 19 | huCD8a-1 | Nucleotide |
| SEQ ID NO: 20 | huCD8a-1 | Amino Acid |
| SEQ ID NO: 21 | Whitlow Linker | Nucleotide |
| SEQ ID NO: 22 | Whitlow Linker | Amino Acid |
| SEQ ID NO: 23 | (G4S)3 linker | Nucleotide |
| SEQ ID NO: 24 | (G4S)3 linker | Amino Acid |
| SEQ ID NO: 25 | (G4S)4 linker | Nucleotide |
| SEQ ID NO: 26 | (G4S)4 linker | Amino Acid |
| SEQ ID NO: 27 | G4S linker | Nucleotide |
| SEQ ID NO: 28 | G4S linker | Amino Acid |
| SEQ ID NO: 29 | huCD8a-2 | Nucleotide |
| SEQ ID NO: 30 | huCD8a-2 | Amino Acid |

### GUCY2C Antigen-Binding Domain

[0095] In certain embodiments, the GUCY2C TAC polypeptide comprises a GUCY2C antigen-binding domain. In some embodiments, the GUCY2C antigen-binding domain selectively binds GUCY2C. In some embodiments, the GUCY2C antigen-binding domain binds to GUCY2C on a target cell. In some embodiments, a target cell is a cell associated with a disease state, including, but not limited to, cancer. In some embodiments, a target cell is a tumor cell.

[0096] In some embodiments, the GUCY2C antigen-binding domain is an antibody or a fragment thereof. In some embodiments, the GUCY2C antigen-binding domain is selected from single chain antibodies (e.g., single-chain fragment variable antibodies (scFvs)), single domain antibodies (e.g., heavy-chain-only antibodies (VHIH), shark heavy-chain-only antibodies (VNAR)), nanobodies, diabodies, minibodies, Fab fragments, Fab′ fragments, F(ab′)₂ fragments, or Fv fragments that bind to GUCY2C.

[0097] In some embodiments, the GUCY2C antigen-binding domain is selected from ankyrin repeat proteins (DARPins), affibodies, adnectins, affilins, phylomers, fynomers, affimers, peptide aptamers, lectins, knottins, centyrins, anticalins, peptides, peptidomimetics, proteins, glycoproteins, or proteoglycans that bind to GUCY2C, or naturally occurring ligands for GUCY2C. In some embodiments, the GUCY2C antigen-binding domain is a non-protein compound that binds to GUCY2C, including but not limited to carbohydrates, lipids, nucleic acids, or small molecules.

[0098] In some embodiments, the GUCY2C antigen-binding domain is a designed ankyrin repeat (DARPin) targeted to GUCY2C. In some embodiments, the GUCY2C antigen-binding domain is a single-chain variable fragment (scFv) targeted to GUCY2C. In some embodiments, the GUCY2C antigen-binding domain is a nanobody targeted to GUCY2C.

[0099] In some embodiments, the GUCY2C antigen-binding domain is selected from an amino acid sequence according to any one of SEQ ID NOs: 53-127 or 514-521.

[0100] In some embodiments, the GUCY2C antigen-binding domain comprises an amino acid sequence having at least 80% sequence identity with an amino acid sequence according to any one of SEQ ID NOs: 53-127 or 514-521. In some embodiments, the GUCY2C antigen-binding domain comprises an amino acid sequence having at least 85% sequence identity with an amino acid sequence according to any one of SEQ ID NOs: 53-127 or 514-521. In some embodiments, the GUCY2C antigen-binding domain comprises an amino acid sequence having at least 90% sequence identity an amino acid sequence according to any one of SEQ ID NOs: 53-127 or 514-521. In some embodiments, the GUCY2C antigen-binding domain comprises an amino acid sequence having at least 95% sequence identity with an amino acid sequence according to any one of SEQ ID NOs: 53-127 or 514-521. In some embodiments, the GUCY2C antigen-binding domain comprises an amino acid sequence having at least 96% sequence identity an amino acid sequence according to any one of SEQ ID NOs: 53-127 or 514-521. In some embodiments, the GUCY2C antigen-binding domain comprises an amino acid sequence having at least 97% sequence identity with an amino acid sequence according to any one of SEQ ID NOs: 53-127 or 514-521. In some embodiments, the GUCY2C antigen-binding domain comprises an amino acid sequence having at least 98% sequence identity with an amino acid sequence according to any one of SEQ ID NOs: 53-127 or 514-521. In some embodiments, the GUCY2C antigen-binding domain comprises an amino acid sequence having at least 99% sequence identity with an amino acid sequence according to any one of SEQ ID NOs: 53-127 or 514-521.

[0101] In some embodiments, the GUCY2C antigen-binding domain comprises an amino acid sequence at least 80% identical to an amino acid sequence according to any one of SEQ ID NOs: 53-127 or 514-521, wherein the CDR sequences of the GUCY2C antigen-binding domain sequence have 100% sequence identity to the CDR sequences of the sequence of the SEQ ID NO. In some embodiments, the GUCY2C antigen-binding domain comprises an amino acid sequence at least 85% identical to an amino acid sequence according to any one of SEQ ID NOs: 53-127 or 514-521, wherein the CDR sequences of the GUCY2C antigen-binding domain sequence have 100% sequence identity to the CDR sequences of the sequence of the SEQ ID NO. In some embodiments, the GUCY2C antigen-binding domain comprises an amino acid sequence at least 90% identical to an amino acid sequence according to any one of SEQ ID NOs: 53-127 or 514-521, wherein the CDR sequences of the GUCY2C antigen-binding domain sequence have 100% sequence identity to the CDR sequences of the sequence of the SEQ ID NO. In some embodiments, the GUCY2C antigen-binding domain comprises an amino acid sequence at least 95% identical to an amino acid sequence according to any one of SEQ ID NOs: 53-127 or 514-521, wherein the CDR sequences of the GUCY2C antigen-binding domain sequence have 100% sequence identity to the CDR sequences of the sequence of the SEQ ID NO. In some embodiments, the GUCY2C antigen-binding domain comprises an amino acid sequence at least 96% identical to an amino acid sequence according to any one of SEQ ID NOs: 53-127 or 514-521, wherein the CDR sequences of the GUCY2C antigen-binding domain sequence have 100% sequence identity to the CDR sequences of the sequence of the SEQ ID NO. In some embodiments, the GUCY2C antigen-binding domain comprises an amino acid sequence at least 97% identical to an amino acid sequence according to any one of SEQ ID NOs: 53-127 or 514-521, wherein the CDR sequences of the GUCY2C antigen-binding domain sequence have 100% sequence identity to the CDR sequences of the sequence of the SEQ ID NO. In some embodiments, the GUCY2C antigen-binding domain comprises an amino acid sequence at least 98% identical to an amino acid sequence according to any one of SEQ ID NOs: 53-127 or 514-521, wherein the CDR sequences of the GUCY2C antigen-binding domain sequence have 100% sequence identity to the CDR sequences of the sequence of the SEQ ID NO. In some embodiments, the GUCY2C antigen-binding domain comprises an amino acid sequence at least 99% identical to an amino acid sequence according to any one of SEQ ID NOs: 53-127 or 514-521, wherein the CDR sequences of the GUCY2C antigen-binding domain sequence have 100% sequence identity to the CDR sequences of the sequence of the SEQ ID NO.

[0102] Amino acid sequences of exemplary GUCY2C antigen-binding domains are provided in Table 4.

TABLE 4
Table of Sequences

| SEQ ID NO. | Description | Amino Acid/Nucleic Acid |
|---|---|---|
| SEQ ID NO: 53 | YU652-B06 | Amino Acid |
| SEQ ID NO: 54 | YU652-C01 | Amino Acid |
| SEQ ID NO: 55 | YU652-F02 | Amino Acid |
| SEQ ID NO: 56 | YU652-H02 | Amino Acid |
| SEQ ID NO: 57 | YU653-B12 | Amino Acid |
| SEQ ID NO: 58 | YU653-D11 | Amino Acid |
| SEQ ID NO: 59 | YU653-F12 | Amino Acid |
| SEQ ID NO: 60 | YU654-E01 | Amino Acid |
| SEQ ID NO: 61 | YU667-A01 | Amino Acid |
| SEQ ID NO: 62 | YU667-A02 | Amino Acid |
| SEQ ID NO: 63 | YU667-A04 | Amino Acid |
| SEQ ID NO: 64 | YU667-B01 | Amino Acid |
| SEQ ID NO: 65 | YU667-B02 | Amino Acid |
| SEQ ID NO: 66 | YU667-B03 | Amino Acid |
| SEQ ID NO: 67 | YU667-C04 | Amino Acid |
| SEQ ID NO: 68 | YU667-C06 | Amino Acid |
| SEQ ID NO: 69 | YU667-D05 | Amino Acid |
| SEQ ID NO: 70 | YU667-D06 | Amino Acid |
| SEQ ID NO: 71 | YU667-E01 | Amino Acid |
| SEQ ID NO: 72 | YU667-E05 | Amino Acid |
| SEQ ID NO: 73 | YU667-F02 | Amino Acid |
| SEQ ID NO: 74 | YU667-F06 | Amino Acid |
| SEQ ID NO: 75 | YU667-G02 | Amino Acid |
| SEQ ID NO: 76 | YU667-G04 | Amino Acid |
| SEQ ID NO: 77 | YU667-G06 | Amino Acid |
| SEQ ID NO: 78 | YU667-H06 | Amino Acid |
| SEQ ID NO: 79 | YU652-B06-Whitlow | Amino Acid |
| SEQ ID NO: 80 | YU652-C01-Whitlow | Amino Acid |
| SEQ ID NO: 81 | YU652-F02-Whitlow | Amino Acid |
| SEQ ID NO: 82 | YU652-H02-Whitlow | Amino Acid |
| SEQ ID NO: 83 | YU653-B12-Whitlow | Amino Acid |
| SEQ ID NO: 84 | YU653-D11-Whitlow | Amino Acid |
| SEQ ID NO: 85 | YU653-F12-Whitlow | Amino Acid |
| SEQ ID NO: 86 | YU654-E01-Whitlow | Amino Acid |
| SEQ ID NO: 87 | YU667-A01-Whitlow | Amino Acid |
| SEQ ID NO: 88 | YU667-A02-Whitlow | Amino Acid |
| SEQ ID NO: 89 | YU667-A04-Whitlow | Amino Acid |
| SEQ ID NO: 90 | YU667-B01-Whitlow | Amino Acid |
| SEQ ID NO: 91 | YU667-B02-Whitlow | Amino Acid |
| SEQ ID NO: 92 | YU667-B03-Whitlow | Amino Acid |
| SEQ ID NO: 93 | YU667-C04-Whitlow | Amino Acid |
| SEQ ID NO: 94 | YU667-C06-Whitlow | Amino Acid |
| SEQ ID NO: 95 | YU667-D05-Whitlow | Amino Acid |
| SEQ ID NO: 96 | YU667-D06-Whitlow | Amino Acid |
| SEQ ID NO: 97 | YU667-E01-Whitlow | Amino Acid |
| SEQ ID NO: 98 | YU667-E05-Whitlow | Amino Acid |
| SEQ ID NO: 99 | YU667-F02-Whitlow | Amino Acid |
| SEQ ID NO: 100 | YU667-F06-Whitlow | Amino Acid |
| SEQ ID NO: 101 | YU667-G02-Whitlow | Amino Acid |
| SEQ ID NO: 102 | YU667-G04-Whitlow | Amino Acid |
| SEQ ID NO: 103 | YU667-G06-Whitlow | Amino Acid |
| SEQ ID NO: 104 | YU667-H06-Whitlow | Amino Acid |
| SEQ ID NO: 105 | 6293-R4A-C2 | Amino Acid |
| SEQ ID NO: 106 | 6293-R4A-E3 | Amino Acid |
| SEQ ID NO: 107 | 6293-R4A-G4 | Amino Acid |
| SEQ ID NO: 108 | 6293-R5A-A5 | Amino Acid |
| SEQ ID NO: 109 | 6293-R5A-B6 | Amino Acid |
| SEQ ID NO: 110 | 6293-R5A-E7 | Amino Acid |
| SEQ ID NO: 111 | 6293-R5A-F6 | Amino Acid |
| SEQ ID NO: 112 | 6293-R6A-A10 | Amino Acid |
| SEQ ID NO: 113 | 6293-R6A-B11 | Amino Acid |
| SEQ ID NO: 114 | 6293-R6A-C9 | Amino Acid |
| SEQ ID NO: 115 | 6293-R6A-G9 | Amino Acid |
| SEQ ID NO: 116 | 6293-R6A-H11 | Amino Acid |
| SEQ ID NO: 117 | TI001-A23 | Amino Acid |
| SEQ ID NO: 118 | TI001-A25 | Amino Acid |
| SEQ ID NO: 119 | TI001-A28 | Amino Acid |
| SEQ ID NO: 120 | TI001-A30 | Amino Acid |
| SEQ ID NO: 121 | TI001-A48 | Amino Acid |
| SEQ ID NO: 122 | TI001-V20 | Amino Acid |
| SEQ ID NO: 123 | TI001-V30 | Amino Acid |
| SEQ ID NO: 124 | TI001-V54 | Amino Acid |
| SEQ ID NO: 125 | TI001-V65 | Amino Acid |
| SEQ ID NO: 126 | TI001-V67 | Amino Acid |
| SEQ ID NO: 127 | TI001-V68 | Amino Acid |
| SEQ ID NO: 514 | T1001-E8 | Amino Acid |
| SEQ ID NO: 515 | T1001-E16 | Amino Acid |
| SEQ ID NO: 516 | T1001-E6 | Amino Acid |
| SEQ ID NO: 517 | T1001-E64 | Amino Acid |
| SEQ ID NO: 518 | T1001-E55 | Amino Acid |
| SEQ ID NO: 519 | T1001-E17 | Amino Acid |
| SEQ ID NO: 520 | T1001-E24 | Amino Acid |
| SEQ ID NO: 521 | T1001-E25 | Amino Acid |

[0103] In some embodiments, the GUCY2C antigen-binding domain comprises a heavy chain variable region having an amino acid sequence according to any one of SEQ TD NOs: 128, 130, 132, 134, 136, 138, 140, 142, 144, 146, 148, 150, 152, 154, 156, 158, 160, 162, 164, 166, 168, 170, 172, 174, 176, 178, 180, 182, 184, 186, 188, 190, 192, 194, 196, 198, 200, and 202; and a light chain variable region having an amino acid sequence according to any one of SEQ TD NOs: 129, 131, 133, 135, 137, 139, 141, 143, 145, 147, 149, 151, 153, 155, 157, 159, 161, 163, 165, 167, 169, 171, 173, 175, 177, 179, 181, 183, 185, 187, 189, 191, 193, 195, 197, 199, 201, and 203.

[0104] In some embodiments, the GUCY2C antigen-binding domain comprises a heavy chain variable region having an amino acid sequence having at least 8000 sequence identity with an amino acid sequence according to any one of SEQ ID NOs: 128, 130, 132, 134, 136, 138, 140, 142, 144, 146, 148, 150, 152, 154, 156, 158, 160, 162, 164, 166, 168, 170, 172, 174, 176, 178, 180, 182, 184, 186, 188, 190, 192, 194, 196, 198, 200, and 202; and a light chain variable region having an amino acid sequence having at least 80% sequence identity with an amino acid sequence according to any one of SEQ ID NOs: 129, 131, 133, 135, 137, 139, 141, 143, 145, 147, 149, 151, 153, 155, 157, 159, 161, 163, 165, 167, 169, 171, 173, 175, 177, 179, 181, 183, 185, 187, 189, 191, 193, 195, 197, 199, 201, and 203. In some embodiments, the GUCY2C antigen-binding domain comprises a heavy chain variable region having an amino acid sequence having at least 85% sequence identity with an amino acid sequence according to any one of SEQ ID NOs: 128, 130, 132, 134, 136, 138, 140, 142, 144, 146, 148, 150, 152, 154, 156, 158, 160, 162, 164, 166, 168, 170, 172, 174, 176, 178, 180, 182, 184, 186, 188, 190, 192, 194, 196, 198, 200, and 202; and a light chain variable region having an amino acid sequence having at least 85% sequence identity with an amino acid sequence according to any one of SEQ ID NOs: 129, 131, 133, 135, 137, 139, 141, 143, 145, 147, 149, 151, 153, 155, 157, 159, 161, 163, 165, 167, 169, 171, 173, 175, 177, 179, 181, 183, 185, 187, 189, 191, 193, 195, 197, 199, 201, and 203. In some embodiments, the GUCY2C antigen-binding domain comprises a heavy chain variable region having an amino acid sequence having at least 90% sequence identity with an amino acid sequence according to any one of SEQ ID NOs: 128, 130, 132, 134, 136, 138, 140, 142, 144, 146, 148, 150, 152, 154, 156, 158, 160, 162, 164, 166, 168, 170, 172, 174, 176, 178, 180, 182, 184, 186, 188, 190, 192, 194, 196, 198, 200, and 202; and a light chain variable region having an amino acid sequence having at least 90% sequence identity with an amino acid sequence according to any one of SEQ ID NOs: 129, 131, 133, 135, 137, 139, 141, 143, 145, 147, 149, 151, 153, 155, 157, 159, 161, 163, 165, 167, 169, 171, 173, 175, 177, 179, 181, 183, 185, 187, 189, 191, 193, 195, 197, 199, 201, and 203. In some embodiments, the GUCY2C antigen-binding domain comprises a heavy chain variable region having an amino acid sequence having at least 95% sequence identity with an amino acid sequence according to any one of SEQ ID NOs: 128, 130, 132, 134, 136, 138, 140, 142, 144, 146, 148, 150, 152, 154, 156, 158, 160, 162, 164, 166, 168, 170, 172, 174, 176, 178, 180, 182, 184, 186, 188, 190, 192, 194, 196, 198, 200, and 202; and a light chain variable region having an amino acid sequence having at least 95% sequence identity with an amino acid sequence according to any one of SEQ ID NOs: 129, 131, 133, 135, 137, 139, 141, 143, 145, 147, 149, 151, 153, 155, 157, 159, 161, 163, 165, 167, 169, 171, 173, 175, 177, 179, 181, 183, 185, 187, 189, 191, 193, 195, 197, 199, 201, and 203. In some embodiments, the GUCY2C antigen-binding domain comprises a heavy chain variable region having an amino acid sequence having at least 96% sequence identity with an amino acid sequence according to any one of SEQ ID NOs: 128, 130, 132, 134, 136, 138, 140, 142, 144, 146, 148, 150, 152, 154, 156, 158, 160, 162, 164, 166, 168, 170, 172, 174, 176, 178, 180, 182, 184, 186, 188, 190, 192, 194, 196, 198, 200, and 202; and a light chain variable region having an amino acid sequence having at least 96% sequence identity with an amino acid sequence according to any one of SEQ ID NOs: 129, 131, 133, 135, 137, 139, 141, 143, 145, 147, 149, 151, 153, 155, 157, 159, 161, 163, 165, 167, 169, 171, 173, 175, 177, 179, 181, 183, 185, 187, 189, 191, 193, 195, 197, 199, 201, and 203. In some embodiments, the GUCY2C antigen-binding domain comprises a heavy chain variable region having an amino acid sequence having at least 97% sequence identity with an amino acid sequence according to any one of SEQ ID NOs: 128, 130, 132, 134, 136, 138, 140, 142, 144, 146, 148, 150, 152, 154, 156, 158, 160, 162, 164, 166, 168, 170, 172, 174, 176, 178, 180, 182, 184, 186, 188, 190, 192, 194, 196, 198, 200, and 202; and a light chain variable region having an amino acid sequence having at least 97% sequence identity with an amino acid sequence according to any one of SEQ ID NOs: 129, 131, 133, 135, 137, 139, 141, 143, 145, 147, 149, 151, 153, 155, 157, 159, 161, 163, 165, 167, 169, 171, 173, 175, 177, 179, 181, 183, 185, 187, 189, 191, 193, 195, 197, 199, 201, and 203. In some embodiments, the GUCY2C antigen-binding domain comprises a heavy chain variable region having an amino acid sequence having at least 98% sequence identity with an amino acid sequence according to any one of SEQ ID NOs: 128, 130, 132, 134, 136, 138, 140, 142, 144, 146, 148, 150, 152, 154, 156, 158, 160, 162, 164, 166, 168, 170, 172, 174, 176, 178, 180, 182, 184, 186, 188, 190, 192, 194, 196, 198, 200, and 202; and a light chain variable region having an amino acid sequence having at least 98% sequence identity with an amino acid sequence according to any one of SEQ ID NOs: 129, 131, 133, 135, 137, 139, 141, 143, 145, 147, 149, 151, 153, 155, 157, 159, 161, 163, 165, 167, 169, 171, 173, 175, 177, 179, 181, 183, 185, 187, 189, 191, 193, 195, 197, 199, 201, and 203. In some embodiments, the GUCY2C antigen-binding domain comprises a heavy chain variable region having an amino acid sequence having at least 99% sequence identity with an amino acid sequence according to any one of SEQ ID NOs: 128, 130, 132, 134, 136, 138, 140, 142, 144, 146, 148, 150, 152, 154, 156, 158, 160, 162, 164, 166, 168, 170, 172, 174, 176, 178, 180, 182, 184, 186, 188, 190, 192, 194, 196, 198, 200, and 202; and a light chain variable region having an amino acid sequence having at least 99% sequence identity with an amino acid sequence according to any one of SEQ ID NOs: 129, 131, 133, 135, 137, 139, 141, 143, 145, 147, 149, 151, 153, 155, 157, 159, 161, 163, 165, 167, 169, 171, 173, 175, 177, 179, 181, 183, 185, 187, 189, 191, 193, 195, 197, 199, 201, and 203.

[0105] In some embodiments, the GUCY2C antigen-binding domain comprises (a) a heavy chain variable region having an amino acid sequence at least 80% identical to a sequence according to any one of SEQ ID NOs: 128, 130, 132, 134, 136, 138, 140, 142, 144, 146, 148, 150, 152, 154, 156, 158, 160, 162, 164, 166, 168, 170, 172, 174, 176, 178, 180, 182, 184, 186, 188, 190, 192, 194, 196, 198, 200, and 202, wherein the CDR sequences of the heavy chain variable region sequence have 100% sequence identity to the CDR sequences of the sequence of the SEQ ID NO.; and (b) a light chain variable region having an amino acid sequence at least 80% identical to a sequence according to any one of SEQ ID NOs: 129, 131, 133, 135, 137, 139, 141, 143, 145, 147, 149, 151, 153, 155, 157, 159, 161, 163, 165, 167, 169, 171, 173, 175, 177, 179, 181, 183, 185, 187, 189, 191, 193, 195, 197, 199, 201, and 203, wherein the CDR sequences of the light chain variable region sequence have 100% sequence identity to the CDR sequences of the sequence of the SEQ ID NO.

[0106] In some embodiments, the GUCY2C antigen-binding domain comprises (a) a heavy chain variable region having an amino acid sequence at least 85% identical to a sequence according to any one of SEQ ID NOs: 128, 130, 132, 134, 136, 138, 140, 142, 144, 146, 148, 150, 152, 154, 156, 158, 160, 162, 164, 166, 168, 170, 172, 174, 176, 178, 180, 182, 184, 186, 188, 190, 192, 194, 196, 198, 200, and 202, wherein the CDR sequences of the heavy chain variable region sequence have 100% sequence identity to the CDR sequences of the sequence of the SEQ ID NO.; and (b) a light chain variable region having an amino acid sequence at least 85% identical to a sequence according to any one of SEQ ID NOs: 129, 131, 133, 135, 137, 139, 141, 143, 145, 147, 149, 151, 153, 155, 157, 159, 161, 163, 165, 167, 169, 171, 173, 175, 177, 179, 181, 183, 185, 187, 189, 191, 193, 195, 197, 199, 201, and 203, wherein the CDR sequences of the light chain variable region sequence have 100% sequence identity to the CDR sequences of the sequence of the SEQ ID NO.

[0107] In some embodiments, the GUCY2C antigen-binding domain comprises (a) a heavy chain variable region having an amino acid sequence at least 90% identical to a sequence according to any one of SEQ ID NOs: 128, 130, 132, 134, 136, 138, 140, 142, 144, 146, 148, 150, 152, 154, 156, 158, 160, 162, 164, 166, 168, 170, 172, 174, 176, 178, 180, 182, 184, 186, 188, 190, 192, 194, 196, 198, 200, and 202, wherein the CDR sequences of the heavy chain variable region sequence have 100% sequence identity to the CDR sequences of the sequence of the SEQ ID NO.; and (b) a light chain variable region having an amino acid sequence at least 90% identical to a sequence according to any one of SEQ ID NOs: 129, 131, 133, 135, 137, 139, 141, 143, 145, 147, 149, 151, 153, 155, 157, 159, 161, 163, 165, 167, 169, 171, 173, 175, 177, 179, 181, 183, 185, 187, 189, 191, 193, 195, 197, 199, 201, and 203, wherein the CDR sequences of the light chain variable region sequence have 100% sequence identity to the CDR sequences of the sequence of the SEQ ID NO.

[0108] In some embodiments, the GUCY2C antigen-binding domain comprises (a) a heavy chain variable region having an amino acid sequence at least 95% identical to a sequence according to any one of SEQ ID NOs: 128, 130, 132, 134, 136, 138, 140, 142, 144, 146, 148, 150, 152, 154, 156, 158, 160, 162, 164, 166, 168, 170, 172, 174, 176, 178, 180, 182, 184, 186, 188, 190, 192, 194, 196, 198, 200, and 202, wherein the CDR sequences of the heavy chain variable region sequence have 100% sequence identity to the CDR sequences of the sequence of the SEQ ID NO.; and (b) a light chain variable region having an amino acid sequence at least 95% identical to a sequence according to any one of SEQ ID NOs: 129, 131, 133, 135, 137, 139, 141, 143, 145, 147, 149, 151, 153, 155, 157, 159, 161, 163, 165, 167, 169, 171, 173, 175, 177, 179, 181, 183, 185, 187, 189, 191, 193, 195, 197, 199, 201, and 203, wherein the CDR sequences of the light chain variable region sequence have 100% sequence identity to the CDR sequences of the sequence of the SEQ ID NO.

[0109] In some embodiments, the GUCY2C antigen-binding domain comprises (a) a heavy chain variable region having an amino acid sequence at least 96% identical to a sequence according to any one of SEQ ID NOs: 128, 130, 132, 134, 136, 138, 140, 142, 144, 146, 148, 150, 152, 154, 156, 158, 160, 162, 164, 166, 168, 170, 172, 174, 176, 178, 180, 182, 184, 186, 188, 190, 192, 194, 196, 198, 200, and 202, wherein the CDR sequences of the heavy chain variable region sequence have 100% sequence identity to the CDR sequences of the sequence of the SEQ ID NO.; and (b) a light chain variable region having an amino acid sequence at least 96% identical to a sequence according to any one of SEQ ID NOs: 129, 131, 133, 135, 137, 139, 141, 143, 145, 147, 149, 151, 153, 155, 157, 159, 161, 163, 165, 167, 169, 171, 173, 175, 177, 179, 181, 183, 185, 187, 189, 191, 193, 195, 197, 199, 201, and 203, wherein the CDR sequences of the light chain variable region sequence have 100% sequence identity to the CDR sequences of the sequence of the SEQ ID NO.

[0110] In some embodiments, the GUCY2C antigen-binding domain comprises (a) a heavy chain variable region having an amino acid sequence at least 97% identical to a sequence according to any one of SEQ ID NOs: 128, 130, 132, 134, 136, 138, 140, 142, 144, 146, 148, 150, 152, 154, 156, 158, 160, 162, 164, 166, 168, 170, 172, 174, 176, 178, 180, 182, 184, 186, 188, 190, 192, 194, 196, 198, 200, and 202, wherein the CDR sequences of the heavy chain variable region sequence have 100% sequence identity to the CDR sequences of the sequence of the SEQ ID NO.; and (b) a light chain variable region having an amino acid sequence at least 97% identical to a sequence according to any one of SEQ ID NOs: 129, 131, 133, 135, 137, 139, 141, 143, 145, 147, 149, 151, 153, 155, 157, 159, 161, 163, 165, 167, 169, 171, 173, 175, 177, 179, 181, 183, 185, 187, 189, 191, 193, 195, 197, 199, 201, and 203, wherein the CDR sequences of the light chain variable region sequence have 100% sequence identity to the CDR sequences of the sequence of the SEQ ID NO.

[0111] In some embodiments, the GUCY2C antigen-binding domain comprises (a) a heavy chain variable region having an amino acid sequence at least 98% identical to a sequence according to any one of SEQ ID NOs: 128, 130, 132, 134, 136, 138, 140, 142, 144, 146, 148, 150, 152, 154, 156, 158, 160, 162, 164, 166, 168, 170, 172, 174, 176, 178, 180, 182, 184, 186, 188, 190, 192, 194, 196, 198, 200, and 202, wherein the CDR sequences of the heavy chain variable region sequence have 100% sequence identity to the CDR sequences of the sequence of the SEQ ID NO.; and (b) a light chain variable region having an amino acid sequence at least 98% identical to a sequence according to any one of SEQ ID NOs: 129, 131, 133, 135, 137, 139, 141, 143, 145, 147, 149, 151, 153, 155, 157, 159, 161, 163, 165, 167, 169, 171, 173, 175, 177, 179, 181, 183, 185, 187, 189, 191, 193, 195, 197, 199, 201, and 203, wherein the CDR sequences of the light chain variable region sequence have 100% sequence identity to the CDR sequences of the sequence of the SEQ ID NO.

[0112] In some embodiments, the GUCY2C antigen-binding domain comprises (a) a heavy chain variable region having an amino acid sequence at least 99% identical to a sequence according to any one of SEQ ID NOs: 128, 130, 132, 134, 136, 138, 140, 142, 144, 146, 148, 150, 152, 154, 156, 158, 160, 162, 164, 166, 168, 170, 172, 174, 176, 178, 180, 182, 184, 186, 188, 190, 192, 194, 196, 198, 200, and 202, wherein the CDR sequences of the heavy chain variable region sequence have 100% sequence identity to the CDR sequences of the sequence of the SEQ ID NO.; and (b) a light chain variable region having an amino acid sequence at least 99% identical to a sequence according to any one of SEQ ID NOs: 129, 131, 133, 135, 137, 139, 141, 143, 145, 147, 149, 151, 153, 155, 157, 159, 161, 163, 165, 167, 169, 171, 173, 175, 177, 179, 181, 183, 185, 187, 189, 191, 193, 195, 197, 199, 201, and 203, wherein the CDR sequences of the light chain variable region sequence have 100% sequence identity to the CDR sequences of the sequence of the SEQ ID NO.

[0113] Amino acid sequences of exemplary GUCY2C antigen-binding domain heavy chain variable regions and light chain variable regions are provided in Table 5.

TABLE 5
Table of Sequences

| SEQ ID NO | Description | Amino Acid/Nucleic Acid |
|---|---|---|
| SEQ ID NO: 128 | 6293-R4A-C2 VH | Amino Acid |
| SEQ ID NO: 129 | 6293-R4A-C2 VL | Amino Acid |
| SEQ ID NO: 130 | 6293-R4A-E3 VH | Amino Acid |
| SEQ ID NO: 131 | 6293-R4A-E3 VL | Amino Acid |
| SEQ ID NO: 132 | 6293-R4A-G4 VH | Amino Acid |
| SEQ ID NO: 133 | 6293-R4A-G4 VL | Amino Acid |
| SEQ ID NO: 134 | 6293-R5A-A5 VH | Amino Acid |
| SEQ ID NO: 135 | 6293-R5A-A5 VL | Amino Acid |
| SEQ ID NO: 136 | 6293-R5A-B6 VH | Amino Acid |
| SEQ ID NO: 137 | 6293-R5A-B6 VL | Amino Acid |
| SEQ ID NO: 138 | 6293-R5A-E7 VH | Amino Acid |
| SEQ ID NO: 139 | 6293-R5A-E7 VL | Amino Acid |
| SEQ ID NO: 140 | 6293-R5A-F6 VH | Amino Acid |
| SEQ ID NO: 141 | 6293-R5A-F6 VL | Amino Acid |
| SEQ ID NO: 142 | 6293-R6A-A10 VH | Amino Acid |
| SEQ ID NO: 143 | 6293-R6A-A10 VL | Amino Acid |
| SEQ ID NO: 144 | 6293-R6A-B11 VH | Amino Acid |
| SEQ ID NO: 145 | 6293-R6A-B11 VL | Amino Acid |
| SEQ ID NO: 146 | 6293-R6A-C9 VH | Amino Acid |
| SEQ ID NO: 147 | 6293-R6A-C9 VL | Amino Acid |
| SEQ ID NO: 148 | 6293-R6A-G9 VH | Amino Acid |
| SEQ ID NO: 149 | 6293-R6A-G9 VL | Amino Acid |
| SEQ ID NO: 150 | 6293-R6A-H11 VH | Amino Acid |
| SEQ ID NO: 151 | 6293-R6A-H11 VL | Amino Acid |
| SEQ ID NO: 152 | YU652-B06 VH | Amino Acid |
| SEQ ID NO: 153 | YU652-B06 VL | Amino Acid |
| SEQ ID NO: 154 | YU652-C01 VH | Amino Acid |
| SEQ ID NO: 155 | YU652-C01 VL | Amino Acid |
| SEQ ID NO: 156 | YU652-F02 VH | Amino Acid |
| SEQ ID NO: 157 | YU652-F02 VL | Amino Acid |
| SEQ ID NO: 158 | YU652-H02 VH | Amino Acid |
| SEQ ID NO: 159 | YU652-H02 VL | Amino Acid |
| SEQ ID NO: 160 | YU653-B12 VH | Amino Acid |
| SEQ ID NO: 161 | YU653-B12 VL | Amino Acid |
| SEQ ID NO: 162 | YU653-D11 VH | Amino Acid |
| SEQ ID NO: 163 | YU653-D11 VL | Amino Acid |
| SEQ ID NO: 164 | YU653-F12 VH | Amino Acid |
| SEQ ID NO: 165 | YU653-F12 VL | Amino Acid |
| SEQ ID NO: 166 | YU654-E01 VH | Amino Acid |
| SEQ ID NO: 167 | YU654-E01 VL | Amino Acid |
| SEQ ID NO: 168 | YU667-A01 VH | Amino Acid |
| SEQ ID NO: 169 | YU667-A01 VL | Amino Acid |
| SEQ ID NO: 170 | YU667-A02 VH | Amino Acid |
| SEQ ID NO: 171 | YU667-A02 VL | Amino Acid |
| SEQ ID NO: 172 | YU667-A04 VH | Amino Acid |
| SEQ ID NO: 173 | YU667-A04 VL | Amino Acid |
| SEQ ID NO: 174 | YU667-B01 VH | Amino Acid |
| SEQ ID NO: 175 | YU667-B01 VL | Amino Acid |
| SEQ ID NO: 176 | YU667-B02 VH | Amino Acid |
| SEQ ID NO: 177 | YU667-B02 VL | Amino Acid |
| SEQ ID NO: 178 | YU667-B03 VH | Amino Acid |
| SEQ ID NO: 179 | YU667-B03 VL | Amino Acid |
| SEQ ID NO: 180 | YU667-C04 VH | Amino Acid |
| SEQ ID NO: 181 | YU667-C04 VL | Amino Acid |
| SEQ ID NO: 182 | YU667-C06 VH | Amino Acid |
| SEQ ID NO: 183 | YU667-C06 VL | Amino Acid |
| SEQ ID NO: 184 | YU667-D05 VH | Amino Acid |
| SEQ ID NO: 185 | YU667-D05 VL | Amino Acid |
| SEQ ID NO: 186 | YU667-D06 VH | Amino Acid |
| SEQ ID NO: 187 | YU667-D06 VL | Amino Acid |
| SEQ ID NO: 188 | YU667-E01 VH | Amino Acid |
| SEQ ID NO: 189 | YU667-E01 VL | Amino Acid |
| SEQ ID NO: 190 | YU667-E05 VH | Amino Acid |
| SEQ ID NO: 191 | YU667-E05 VL | Amino Acid |
| SEQ ID NO: 192 | YU667-F02 VH | Amino Acid |
| SEQ ID NO: 193 | YU667-F02 VL | Amino Acid |
| SEQ ID NO: 194 | YU667-F06 VH | Amino Acid |
| SEQ ID NO: 195 | YU667-F06 VL | Amino Acid |
| SEQ ID NO: 196 | YU667-G02 VH | Amino Acid |
| SEQ ID NO: 197 | YU667-G02 VL | Amino Acid |
| SEQ ID NO: 198 | YU667-G04 VH | Amino Acid |
| SEQ ID NO: 199 | YU667-G04 VL | Amino Acid |
| SEQ ID NO: 200 | YU667-G06 VH | Amino Acid |
| SEQ ID NO: 201 | YU667-G06 VL | Amino Acid |
| SEQ ID NO: 202 | YU667-H06 VH | Amino Acid |
| SEQ ID NO: 203 | YU667-H06 VL | Amino Acid |

[0114] In some embodiments, the GUCY2C antigen-binding domain comprises a heavy chain variable region comprising (a) a CDR1 having an amino acid selected from the group consisting of SEQ TD NO: 204, 210, 216, 222, 228, 234, 240, 246, 252, 258, 264, 270, 276, 282, 288, 294, 300, 306, 312, 318, 324, 330, 336, 342, 348, 354, 393, 399, 405, 411, 417, 423, 429, 435, 441, 447, 453, 459, 522, 525, 528, 531, 534, 537, 540, and 543, (b) a CDR2 having an amino acid selected from the group consisting of SEQ TD NO: 205, 211, 217, 223, 229, 235, 241, 247, 253, 259, 265, 271, 277, 283, 289, 295, 301, 307, 313, 319, 325, 331, 337, 343, 349, 355, 394, 400, 406, 412, 418, 424, 430, 436, 442, 448, 454, 460, 523, 526, 529, 532, 535, 538, 541, and 544, and (c) a CDR3 having an amino acid selected from the group consisting of SEQ ID NO: 206, 212, 218, 224, 230, 236, 242, 248, 254, 260, 266, 272, 278, 284, 290, 296, 302, 308, 314, 320, 326, 332, 338, 344, 350, 356, 395, 401, 407, 413, 419, 425, 431, 437, 443, 449, 455, 461, 524, 527, 530, 533, 536, 539, 542, and 545; and a light chain variable region comprising (a) a CDR1 having an amino acid selected from the group consisting of SEQ ID NO: 207, 213, 219, 225, 231, 237, 243, 249, 255, 261, 267, 273, 279, 285, 291, 297, 303, 309, 315, 321, 327, 333, 339, 345, 351, 357, 396, 402, 408, 414, 420, 426, 432, 438, 444, 450, 456 and 462, (b) a CDR2 having an amino acid selected from the group consisting of SEQ ID NO: 208, 214, 220, 226, 232, 238, 244, 250, 256, 262, 268, 274, 280, 286, 292, 298, 304, 310, 316, 322, 328, 334, 340, 346, 352, 358, 397, 403, 409, 415, 421, 427, 433, 439, 445, 451, 457 and 463, and (c) a CDR3 having an amino acid selected from the group consisting of SEQ ID NO: 209, 215, 221, 227, 233, 239, 245, 251, 257, 263, 269, 275, 281, 287, 293, 299, 305, 311, 317, 323, 329, 335, 341, 347, 353, 359, 398, 404, 410, 416, 422, 428, 434, 440, 446, 452, 458 and 464.

[0115] In some embodiments, the GUCY2C antigen-binding domain is a nanobody and comprises (a) a VHH CDR1 having an amino acid selected from the group consisting of SEQ ID NO: 360, 363, 366, 369, 372, 375, 378, 381, 384, 387, and 390; (b) a VHH CDR2 having an amino acid selected from the group consisting of SEQ ID NO: 361, 364, 367, 370, 373, 376, 379, 382, 385, 388, and 391; and (c) a VHH CDR3 having an amino acid selected from the group consisting of SEQ ID NO: 362, 365, 368, 371, 374, 377, 380, 383, 386, 389, and 392.

[0116] Amino acid sequences of exemplary GUCY2C antigen-binding domain CDRs are provided in Table 6.

TABLE 6
Table of Sequences

| SEQ ID NO | Description | Amino Acid/Nucleic Acid |
|---|---|---|
| SEQ ID NO: 204 | YU653-F12 VH CDR1 | Amino Acid |
| SEQ ID NO: 205 | YU653-F12 VH CDR2 | Amino Acid |
| SEQ ID NO: 206 | YU653-F12 VH CDR3 | Amino Acid |
| SEQ ID NO: 207 | YU653-F12 VL CDR1 | Amino Acid |
| SEQ ID NO: 208 | YU653-F12 VL CDR2 | Amino Acid |
| SEQ ID NO: 209 | YU653-F12 VL CDR3 | Amino Acid |
| SEQ ID NO: 210 | YU652-B06 VH CDR1 | Amino Acid |
| SEQ ID NO: 211 | YU652-B06 VH CDR2 | Amino Acid |
| SEQ ID NO: 212 | YU652-B06 VH CDR3 | Amino Acid |
| SEQ ID NO: 213 | YU652-B06 VL CDR1 | Amino Acid |
| SEQ ID NO: 214 | YU652-B06 VL CDR2 | Amino Acid |
| SEQ ID NO: 215 | YU652-B06 VL CDR3 | Amino Acid |
| SEQ ID NO: 216 | YU653-D11 VH CDR1 | Amino Acid |
| SEQ ID NO: 217 | YU653-D11 VH CDR2 | Amino Acid |
| SEQ ID NO: 218 | YU653-D11 VH CDR3 | Amino Acid |
| SEQ ID NO: 219 | YU653-D11 VL CDR1 | Amino Acid |
| SEQ ID NO: 220 | YU653-D11 VL CDR2 | Amino Acid |
| SEQ ID NO: 221 | YU653-D11 VL CDR3 | Amino Acid |
| SEQ ID NO: 222 | YU652-C01 VH CDR1 | Amino Acid |
| SEQ ID NO: 223 | YU652-C01 VH CDR2 | Amino Acid |
| SEQ ID NO: 224 | YU652-C01 VH CDR3 | Amino Acid |
| SEQ ID NO: 225 | YU652-C01 VL CDR1 | Amino Acid |
| SEQ ID NO: 226 | YU652-C01 VL CDR2 | Amino Acid |
| SEQ ID NO: 227 | YU652-C01 VL CDR3 | Amino Acid |
| SEQ ID NO: 228 | YU652-H02 VH CDR1 | Amino Acid |
| SEQ ID NO: 229 | YU652-H02 VH CDR2 | Amino Acid |
| SEQ ID NO: 230 | YU652-H02 VH CDR3 | Amino Acid |
| SEQ ID NO: 231 | YU652-H02 VL CDR1 | Amino Acid |
| SEQ ID NO: 232 | YU652-H02 VL CDR2 | Amino Acid |
| SEQ ID NO: 233 | YU652-H02 VL CDR3 | Amino Acid |
| SEQ ID NO: 234 | YU654-E01 VH CDR1 | Amino Acid |
| SEQ ID NO: 235 | YU654-E01 VH CDR2 | Amino Acid |
| SEQ ID NO: 236 | YU654-E01 VH CDR3 | Amino Acid |
| SEQ ID NO: 237 | YU654-E01 VL CDR1 | Amino Acid |
| SEQ ID NO: 238 | YU654-E01 VL CDR2 | Amino Acid |
| SEQ ID NO: 239 | YU654-E01 VL CDR3 | Amino Acid |
| SEQ ID NO: 240 | YU653-B12 VH CDR 1 | Amino Acid |
| SEQ ID NO: 241 | YU653-B12 VH CDR 2 | Amino Acid |
| SEQ ID NO: 242 | YU653-B12 VH CDR 3 | Amino Acid |
| SEQ ID NO: 243 | YU653-B12 VL CDR 1 | Amino Acid |
| SEQ ID NO: 244 | YU653-B12 VL CDR 2 | Amino Acid |
| SEQ ID NO: 245 | YU653-B12 VL CDR 3 | Amino Acid |
| SEQ ID NO: 246 | YU652-F02 VH CDR 1 | Amino Acid |
| SEQ ID NO: 247 | YU652-F02 VH CDR 2 | Amino Acid |
| SEQ ID NO: 248 | YU652-F02 VH CDR 3 | Amino Acid |
| SEQ ID NO: 249 | YU652-F02 VL CDR 1 | Amino Acid |
| SEQ ID NO: 250 | YU652-F02 VL CDR 2 | Amino Acid |
| SEQ ID NO: 251 | YU652-F02 VL CDR 3 | Amino Acid |
| SEQ ID NO: 252 | YU667-C06 VH CDR 1 | Amino Acid |
| SEQ ID NO: 253 | YU667-C06 VH CDR 2 | Amino Acid |
| SEQ ID NO: 254 | YU667-C06 VH CDR 3 | Amino Acid |
| SEQ ID NO: 255 | YU667-C06 VL CDR 1 | Amino Acid |
| SEQ ID NO: 256 | YU667-C06 VL CDR 2 | Amino Acid |
| SEQ ID NO: 257 | YU667-C06 VL CDR 3 | Amino Acid |
| SEQ ID NO: 258 | YU667-E01 VH CDR 1 | Amino Acid |
| SEQ ID NO: 259 | YU667-E01 VH CDR 2 | Amino Acid |
| SEQ ID NO: 260 | YU667-E01 VH CDR 3 | Amino Acid |
| SEQ ID NO: 261 | YU667-E01 VL CDR 1 | Amino Acid |
| SEQ ID NO: 262 | YU667-E01 VL CDR 2 | Amino Acid |
| SEQ ID NO: 263 | YU667-E01 VL CDR 3 | Amino Acid |
| SEQ ID NO: 264 | YU667-B03 VH CDR 1 | Amino Acid |
| SEQ ID NO: 265 | YU667-B03 VH CDR 2 | Amino Acid |
| SEQ ID NO: 266 | YU667-B03 VH CDR 3 | Amino Acid |
| SEQ ID NO: 267 | YU667-B03 VL CDR 1 | Amino Acid |
| SEQ ID NO: 268 | YU667-B03 VL CDR 2 | Amino Acid |
| SEQ ID NO: 269 | YU667-B03 VL CDR 3 | Amino Acid |
| SEQ ID NO: 270 | YU667-F06 VH CDR 1 | Amino Acid |
| SEQ ID NO: 271 | YU667-F06 VH CDR 2 | Amino Acid |
| SEQ ID NO: 272 | YU667-F06 VH CDR 3 | Amino Acid |
| SEQ ID NO: 273 | YU667-F06 VL CDR 1 | Amino Acid |
| SEQ ID NO: 274 | YU667-F06 VL CDR 2 | Amino Acid |
| SEQ ID NO: 275 | YU667-F06 VL CDR 3 | Amino Acid |
| SEQ ID NO: 276 | YU667-C04 VH CDR 1 | Amino Acid |
| SEQ ID NO: 277 | YU667-C04 VH CDR 2 | Amino Acid |
| SEQ ID NO: 278 | YU667-C04 VH CDR 3 | Amino Acid |
| SEQ ID NO: 279 | YU667-C04 VL CDR 1 | Amino Acid |
| SEQ ID NO: 280 | YU667-C04 VL CDR 2 | Amino Acid |
| SEQ ID NO: 281 | YU667-C04 VL CDR 3 | Amino Acid |
| SEQ ID NO: 282 | YU667-G06 VH CDR 1 | Amino Acid |
| SEQ ID NO: 283 | YU667-G06 VH CDR 2 | Amino Acid |
| SEQ ID NO: 284 | YU667-G06 VH CDR 3 | Amino Acid |
| SEQ ID NO: 285 | YU667-G06 VL CDR 1 | Amino Acid |
| SEQ ID NO: 286 | YU667-G06 VL CDR 2 | Amino Acid |
| SEQ ID NO: 287 | YU667-G06 VL CDR 3 | Amino Acid |
| SEQ ID NO: 288 | YU667-D06 VH CDR 1 | Amino Acid |
| SEQ ID NO: 289 | YU667-D06 VH CDR 2 | Amino Acid |
| SEQ ID NO: 290 | YU667-D06 VH CDR 3 | Amino Acid |
| SEQ ID NO: 291 | YU667-D06 VL CDR 1 | Amino Acid |
| SEQ ID NO: 292 | YU667-D06 VL CDR 2 | Amino Acid |
| SEQ ID NO: 293 | YU667-D06 VL CDR 3 | Amino Acid |
| SEQ ID NO: 294 | YU667-G04 VH CDR 1 | Amino Acid |
| SEQ ID NO: 295 | YU667-G04 VH CDR 2 | Amino Acid |
| SEQ ID NO: 296 | YU667-G04 VH CDR 3 | Amino Acid |
| SEQ ID NO: 297 | YU667-G04 VL CDR 1 | Amino Acid |
| SEQ ID NO: 298 | YU667-G04 VL CDR 2 | Amino Acid |
| SEQ ID NO: 299 | YU667-G04 VL CDR 3 | Amino Acid |
| SEQ ID NO: 300 | YU667-H06 VH CDR 1 | Amino Acid |
| SEQ ID NO: 301 | YU667-H06 VH CDR 2 | Amino Acid |
| SEQ ID NO: 302 | YU667-H06 VH CDR 3 | Amino Acid |
| SEQ ID NO: 303 | YU667-H06 VL CDR 1 | Amino Acid |
| SEQ ID NO: 304 | YU667-H06 VL CDR 2 | Amino Acid |
| SEQ ID NO: 305 | YU667-H06 VL CDR 3 | Amino Acid |
| SEQ ID NO: 306 | YU667-E05 VH CDR 1 | Amino Acid |
| SEQ ID NO: 307 | YU667-E05 VH CDR 2 | Amino Acid |
| SEQ ID NO: 308 | YU667-E05 VH CDR 3 | Amino Acid |
| SEQ ID NO: 309 | YU667-E05 VL CDR 1 | Amino Acid |
| SEQ ID NO: 310 | YU667-E05 VL CDR 2 | Amino Acid |
| SEQ ID NO: 311 | YU667-E05 VL CDR 3 | Amino Acid |
| SEQ ID NO: 312 | YU667-A04 VH CDR 1 | Amino Acid |
| SEQ ID NO: 313 | YU667-A04 VH CDR 2 | Amino Acid |
| SEQ ID NO: 314 | YU667-A04 VH CDR 3 | Amino Acid |
| SEQ ID NO: 315 | YU667-A04 VL CDR 1 | Amino Acid |
| SEQ ID NO: 316 | YU667-A04 VL CDR 2 | Amino Acid |
| SEQ ID NO: 317 | YU667-A04 VL CDR 3 | Amino Acid |
| SEQ ID NO: 318 | YU667-G02 VH CDR 1 | Amino Acid |
| SEQ ID NO: 319 | YU667-G02 VH CDR 2 | Amino Acid |
| SEQ ID NO: 320 | YU667-G02 VH CDR 3 | Amino Acid |
| SEQ ID NO: 321 | YU667-G02 VL CDR 1 | Amino Acid |
| SEQ ID NO: 322 | YU667-G02 VL CDR 2 | Amino Acid |
| SEQ ID NO: 323 | YU667-G02 VL CDR 3 | Amino Acid |
| SEQ ID NO: 324 | YU667-A01 VH CDR 1 | Amino Acid |
| SEQ ID NO: 325 | YU667-A01 VH CDR 2 | Amino Acid |
| SEQ ID NO: 326 | YU667-A01 VH CDR 3 | Amino Acid |
| SEQ ID NO: 327 | YU667-A01 VL CDR 1 | Amino Acid |
| SEQ ID NO: 328 | YU667-A01 VL CDR 2 | Amino Acid |
| SEQ ID NO: 329 | YU667-A01 VL CDR 3 | Amino Acid |
| SEQ ID NO: 330 | YU667-F02 VH CDR 1 | Amino Acid |
| SEQ ID NO: 331 | YU667-F02 VH CDR 2 | Amino Acid |
| SEQ ID NO: 332 | YU667-F02 VH CDR 3 | Amino Acid |
| SEQ ID NO: 333 | YU667-F02 VL CDR 1 | Amino Acid |
| SEQ ID NO: 334 | YU667-F02 VL CDR 2 | Amino Acid |
| SEQ ID NO: 335 | YU667-F02 VL CDR 3 | Amino Acid |
| SEQ ID NO: 336 | YU667-B02 VH CDR 1 | Amino Acid |
| SEQ ID NO: 337 | YU667-B02 VH CDR 2 | Amino Acid |
| SEQ ID NO: 338 | YU667-B02 VH CDR 3 | Amino Acid |
| SEQ ID NO: 339 | YU667-B02 VL CDR 1 | Amino Acid |
| SEQ ID NO: 340 | YU667-B02 VL CDR 2 | Amino Acid |
| SEQ ID NO: 341 | YU667-B02 VL CDR 3 | Amino Acid |
| SEQ ID NO: 342 | YU667-B01 VH CDR 1 | Amino Acid |
| SEQ ID NO: 343 | YU667-B01 VH CDR 2 | Amino Acid |
| SEQ ID NO: 344 | YU667-B01 VH CDR 3 | Amino Acid |
| SEQ ID NO: 345 | YU667-B01 VL CDR 1 | Amino Acid |
| SEQ ID NO: 346 | YU667-B01 VL CDR 2 | Amino Acid |
| SEQ ID NO: 347 | YU667-B01 VL CDR 3 | Amino Acid |
| SEQ ID NO: 348 | YU667-A02 VH CDR 1 | Amino Acid |
| SEQ ID NO: 349 | YU667-A02 VH CDR 2 | Amino Acid |
| SEQ ID NO: 350 | YU667-A02 VH CDR 3 | Amino Acid |
| SEQ ID NO: 351 | YU667-A02 VL CDR 1 | Amino Acid |
| SEQ ID NO: 352 | YU667-A02 VL CDR 2 | Amino Acid |
| SEQ ID NO: 353 | YU667-A02 VL CDR 3 | Amino Acid |
| SEQ ID NO: 354 | YU667-D05 VH CDR 1 | Amino Acid |
| SEQ ID NO: 355 | YU667-D05 VH CDR 2 | Amino Acid |
| SEQ ID NO: 356 | YU667-D05 VH CDR 3 | Amino Acid |
| SEQ ID NO: 357 | YU667-D05 VL CDR 1 | Amino Acid |
| SEQ ID NO: 358 | YU667-D05 VL CDR 2 | Amino Acid |
| SEQ ID NO: 359 | YU667-D05 VL CDR 3 | Amino Acid |
| SEQ ID NO: 360 | TI001-V54 VHH CDR 1 | Amino Acid |
| SEQ ID NO: 361 | TI001-V54 VHH CDR 2 | Amino Acid |
| SEQ ID NO: 362 | TI001-V54 VHH CDR 3 | Amino Acid |
| SEQ ID NO: 363 | TI001-V65 VHH CDR 1 | Amino Acid |
| SEQ ID NO: 364 | TI001-V65 VHH CDR 2 | Amino Acid |
| SEQ ID NO: 365 | TI001-V65 VHH CDR 3 | Amino Acid |
| SEQ ID NO: 366 | TI001-V20 VHH CDR 1 | Amino Acid |
| SEQ ID NO: 367 | TI001-V20 VHH CDR 2 | Amino Acid |
| SEQ ID NO: 368 | TI001-V20 VHH CDR 3 | Amino Acid |
| SEQ ID NO: 369 | TI001-A23 VHH CDR 1 | Amino Acid |
| SEQ ID NO: 370 | TI001-A23 VHH CDR 2 | Amino Acid |
| SEQ ID NO: 371 | TI001-A23 VHH CDR 3 | Amino Acid |
| SEQ ID NO: 372 | TI001-A25 VHH CDR 1 | Amino Acid |
| SEQ ID NO: 373 | TI001-A25 VHH CDR 2 | Amino Acid |
| SEQ ID NO: 374 | TI001-A25 VHH CDR 3 | Amino Acid |
| SEQ ID NO: 375 | TI001-A28 VHH CDR 1 | Amino Acid |
| SEQ ID NO: 376 | TI001-A28 VHH CDR 2 | Amino Acid |
| SEQ ID NO: 377 | TI001-A28 VHH CDR 3 | Amino Acid |
| SEQ ID NO: 378 | TI001-A30 VHH CDR 1 | Amino Acid |
| SEQ ID NO: 379 | TI001-A30 VHH CDR 2 | Amino Acid |
| SEQ ID NO: 380 | TI001-A30 VHH CDR 3 | Amino Acid |
| SEQ ID NO: 381 | TI001-A48 VHH CDR 1 | Amino Acid |
| SEQ ID NO: 382 | TI001-A48 VHH CDR 2 | Amino Acid |
| SEQ ID NO: 383 | TI001-A48 VHH CDR 3 | Amino Acid |
| SEQ ID NO: 384 | TI001-V30 VHH CDR 1 | Amino Acid |
| SEQ ID NO: 385 | TI001-V30 VHH CDR 2 | Amino Acid |
| SEQ ID NO: 386 | TI001-V30 VHH CDR 3 | Amino Acid |
| SEQ ID NO: 387 | TI001-V67 VHH CDR 1 | Amino Acid |
| SEQ ID NO: 388 | TI001-V67 VHH CDR 2 | Amino Acid |
| SEQ ID NO: 389 | TI001-V67 VHH CDR 3 | Amino Acid |
| SEQ ID NO: 390 | TI001-V68 VHH CDR 1 | Amino Acid |
| SEQ ID NO: 391 | TI001-V68 VHH CDR 2 | Amino Acid |
| SEQ ID NO: 392 | TI001-V68 VHH CDR 3 | Amino Acid |
| SEQ ID NO: 393 | 6293-R4A-C2 VH CDR 1 | Amino Acid |
| SEQ ID NO: 394 | 6293-R4A-C2 VH CDR 2 | Amino Acid |
| SEQ ID NO: 395 | 6293-R4A-C2 VH CDR 3 | Amino Acid |
| SEQ ID NO: 396 | 6293-R4A-C2 VL CDR 1 | Amino Acid |
| SEQ ID NO: 397 | 6293-R4A-C2 VL CDR 2 | Amino Acid |
| SEQ ID NO: 398 | 6293-R4A-C2 VL CDR 3 | Amino Acid |
| SEQ ID NO: 399 | 6293-R4A-E3 VH CDR 1 | Amino Acid |
| SEQ ID NO: 400 | 6293-R4A-E3 VH CDR 2 | Amino Acid |
| SEQ ID NO: 401 | 6293-R4A-E3 VH CDR 3 | Amino Acid |
| SEQ ID NO: 402 | 6293-R4A-E3 VL CDR 1 | Amino Acid |
| SEQ ID NO: 403 | 6293-R4A-E3 VL CDR 2 | Amino Acid |
| SEQ ID NO: 404 | 6293-R4A-E3 VL CDR 3 | Amino Acid |
| SEQ ID NO: 405 | 6293-R4A-G4 VH CDR 1 | Amino Acid |
| SEQ ID NO: 406 | 6293-R4A-G4 VH CDR 2 | Amino Acid |
| SEQ ID NO: 407 | 6293-R4A-G4 VH CDR 3 | Amino Acid |
| SEQ ID NO: 408 | 6293-R4A-G4 VL CDR 1 | Amino Acid |
| SEQ ID NO: 409 | 6293-R4A-G4 VL CDR 2 | Amino Acid |
| SEQ ID NO: 410 | 6293-R4A-G4 VL CDR 3 | Amino Acid |
| SEQ ID NO: 411 | 6293-R5A-A5 VH CDR 1 | Amino Acid |
| SEQ ID NO: 412 | 6293-R5A-A5 VH CDR 2 | Amino Acid |
| SEQ ID NO: 413 | 6293-R5A-A5 VH CDR 3 | Amino Acid |
| SEQ ID NO: 414 | 6293-R5A-A5 VL CDR 1 | Amino Acid |
| SEQ ID NO: 415 | 6293-R5A-A5 VL CDR 2 | Amino Acid |
| SEQ ID NO: 416 | 6293-R5A-A5 VL CDR 3 | Amino Acid |
| SEQ ID NO: 417 | 6293-R5A-B6 VH CDR 1 | Amino Acid |
| SEQ ID NO: 418 | 6293-R5A-B6 VH CDR 2 | Amino Acid |
| SEQ ID NO: 419 | 6293-R5A-B6 VH CDR 3 | Amino Acid |
| SEQ ID NO: 420 | 6293-R5A-B6 VL CDR 1 | Amino Acid |
| SEQ ID NO: 421 | 6293-R5A-B6 VL CDR 2 | Amino Acid |
| SEQ ID NO: 422 | 6293-R5A-B6 VL CDR 3 | Amino Acid |
| SEQ ID NO: 423 | 6293-R5A-E7 VH CDR 1 | Amino Acid |
| SEQ ID NO: 424 | 6293-R5A-E7 VH CDR 2 | Amino Acid |
| SEQ ID NO: 425 | 6293-R5A-E7 VH CDR 3 | Amino Acid |
| SEQ ID NO: 426 | 6293-R5A-E7 VL CDR 1 | Amino Acid |
| SEQ ID NO: 427 | 6293-R5A-E7 VL CDR 2 | Amino Acid |
| SEQ ID NO: 428 | 6293-R5A-E7 VL CDR 3 | Amino Acid |
| SEQ ID NO: 429 | 6293-R5A-F6 VH CDR 1 | Amino Acid |
| SEQ ID NO: 430 | 6293-R5A-F6 VH CDR 2 | Amino Acid |
| SEQ ID NO: 431 | 6293-R5A-F6 VH CDR 3 | Amino Acid |
| SEQ ID NO: 432 | 6293-R5A-F6 VL CDR 1 | Amino Acid |
| SEQ ID NO: 433 | 6293-R5A-F6 VL CDR 2 | Amino Acid |
| SEQ ID NO: 434 | 6293-R5A-F6 VL CDR 3 | Amino Acid |
| SEQ ID NO: 435 | 6293-R6A-A10 VH CDR 1 | Amino Acid |
| SEQ ID NO: 436 | 6293-R6A-A10 VH CDR 2 | Amino Acid |
| SEQ ID NO: 437 | 6293-R6A-A10 VH CDR 3 | Amino Acid |
| SEQ ID NO: 438 | 6293-R6A-A10 VL CDR 1 | Amino Acid |
| SEQ ID NO: 439 | 6293-R6A-A10 VL CDR 2 | Amino Acid |
| SEQ ID NO: 440 | 6293-R6A-A10 VL CDR 3 | Amino Acid |
| SEQ ID NO: 441 | 6293-R6A-B11 VH CDR 1 | Amino Acid |
| SEQ ID NO: 442 | 6293-R6A-B11 VH CDR 2 | Amino Acid |
| SEQ ID NO: 443 | 6293-R6A-B11 VH CDR 3 | Amino Acid |
| SEQ ID NO: 444 | 6293-R6A-B11 VL CDR 1 | Amino Acid |
| SEQ ID NO: 445 | 6293-R6A-B11 VL CDR 2 | Amino Acid |
| SEQ ID NO: 446 | 6293-R6A-B11 VL CDR 3 | Amino Acid |
| SEQ ID NO: 447 | 6293-R6A-C9 VH CDR 1 | Amino Acid |
| SEQ ID NO: 448 | 6293-R6A-C9 VH CDR 2 | Amino Acid |
| SEQ ID NO: 449 | 6293-R6A-C9 VH CDR 3 | Amino Acid |
| SEQ ID NO: 450 | 6293-R6A-C9 VL CDR 1 | Amino Acid |
| SEQ ID NO: 451 | 6293-R6A-C9 VL CDR 2 | Amino Acid |
| SEQ ID NO: 452 | 6293-R6A-C9 VL CDR 3 | Amino Acid |
| SEQ ID NO: 453 | 6293-R6A-G9 VH CDR 1 | Amino Acid |
| SEQ ID NO: 454 | 6293-R6A-G9 VH CDR 2 | Amino Acid |
| SEQ ID NO: 455 | 6293-R6A-G9 VH CDR 3 | Amino Acid |
| SEQ ID NO: 456 | 6293-R6A-G9 VL CDR 1 | Amino Acid |
| SEQ ID NO: 457 | 6293-R6A-G9 VL CDR 2 | Amino Acid |
| SEQ ID NO: 458 | 6293-R6A-G9 VL CDR 3 | Amino Acid |
| SEQ ID NO: 459 | 6293-R6A-H11 VH CDR 1 | Amino Acid |
| SEQ ID NO: 460 | 6293-R6A-H11 VH CDR 2 | Amino Acid |
| SEQ ID NO: 461 | 6293-R6A-H11 VH CDR 3 | Amino Acid |
| SEQ ID NO: 462 | 6293-R6A-H11 VL CDR 1 | Amino Acid |
| SEQ ID NO: 463 | 6293-R6A-H11 VL CDR 2 | Amino Acid |
| SEQ ID NO: 464 | 6293-R6A-H11 VL CDR 3 | Amino Acid |
| SEQ ID NO: 522 | T1001-E8 CDR1 | Amino Acid |
| SEQ ID NO: 523 | T1001-E8 CDR2 | Amino Acid |
| SEQ ID NO: 524 | T1001-E8 CDR3 | Amino Acid |
| SEQ ID NO: 525 | T1001-E16 CDR1 | Amino Acid |
| SEQ ID NO: 526 | T1001-E16 CDR2 | Amino Acid |
| SEQ ID NO: 527 | T1001-E16 CDR3 | Amino Acid |
| SEQ ID NO: 528 | T1001-E6 CDR1 | Amino Acid |
| SEQ ID NO: 529 | T1001-E6 CDR2 | Amino Acid |
| SEQ ID NO: 530 | T1001-E6 CDR3 | Amino Acid |
| SEQ ID NO: 531 | T1001-E64 CDR1 | Amino Acid |
| SEQ ID NO: 532 | T1001-E64 CDR2 | Amino Acid |
| SEQ ID NO: 533 | T1001-E64 CDR3 | Amino Acid |
| SEQ ID NO: 534 | T1001-E55 CDR1 | Amino Acid |
| SEQ ID NO: 535 | T1001-E55 CDR2 | Amino Acid |
| SEQ ID NO: 536 | T1001-E55 CDR3 | Amino Acid |
| SEQ ID NO: 537 | T1001-E17 CDR1 | Amino Acid |
| SEQ ID NO: 538 | T1001-E17 CDR2 | Amino Acid |
| SEQ ID NO: 539 | T1001-E17 CDR3 | Amino Acid |
| SEQ ID NO: 540 | T1001-E24 CDR1 | Amino Acid |
| SEQ ID NO: 541 | T1001-E24 CDR2 | Amino Acid |
| SEQ ID NO: 542 | T1001-E24 CDR3 | Amino Acid |
| SEQ ID NO: 543 | T1001-E25 CDR1 | Amino Acid |
| SEQ ID NO: 544 | T1001-E25 CDR2 | Amino Acid |
| SEQ ID NO: 545 | T1001-E25 CDR3 | Amino Acid |

### Specific TACs

[0117] Disclosed herein, in certain embodiments, are GUYC2C TAC proteins comprising an amino acid sequence with the amino acid sequence of any one of SEQ TD NOs: 465-513, 546-590, or 686.

[0118] In some embodiments, the GUCY2C TAC protein comprises an amino acid sequence having at least 8000 sequence identity with the amino acid sequence of any one of SEQ TD NOs: 465-513, 546-590, or 686. In some embodiments, the GUCY2C TAC protein comprises an amino acid sequence having at least 850% sequence identity with the amino acid sequence of any one of SEQ TD NOs: 465-513, 546-590, or 686. In some embodiments, the GUCY2C TAC protein comprises an amino acid sequence having at least 900% sequence identity with the amino acid sequence of any one of SEQ ID NOs: 465-513, 546-590, or 686. In some embodiments, the GUCY2C TAC protein comprises an amino acid sequence having at least 9500 sequence identity with the amino acid sequence of any one of SEQ ID NOs: 465-513, 546-590, or 686. In some embodiments, the GUCY2C TAC protein comprises an amino acid sequence having at least 96% sequence identity with the amino acid sequence of any one of SEQ ID NOs: 465-513, 546-590, or 686. In some embodiments, the GUCY2C TAC protein comprises an amino acid sequence having at least 9700 sequence identity with the amino acid sequence of any one of SEQ ID NOs: 465-513, 546-590, or 686. In some embodiments, the GUCY2C TAC protein comprises an amino acid sequence having at least 98% sequence identity with the amino acid sequence of any one of SEQ ID NOs: 465-513, 546-590, or 686. In some embodiments, the GUCY2C TAC protein comprises an amino acid sequence having at least 99% sequence identity with the amino acid sequence of any one of SEQ ID NOs: 465-513, 546-590, or 686. In some embodiments, the GUCY2C TAC protein comprises an amino acid sequence of any one of SEQ ID NOs: 465-513, 546-590, or 686.

[0119] In some embodiments, the GUCY2C TAC protein comprises an amino acid sequence having at least 80% sequence identity with the amino acid sequence of SEQ ID NO: 569. In some embodiments, the GUCY2C TAC protein comprises an amino acid sequence having at least 85% sequence identity with the amino acid sequence of SEQ ID NO: 569. In some embodiments, the GUCY2C TAC protein comprises an amino acid sequence having at least 90% sequence identity with the amino acid sequence of SEQ ID NO: 569. In some embodiments, the GUCY2C TAC protein comprises an amino acid sequence having at least 95% sequence identity with the amino acid sequence of SEQ ID NO: 569. In some embodiments, the GUCY2C TAC protein comprises an amino acid sequence having at least 96% sequence identity with the amino acid sequence of SEQ ID NO: 569. In some embodiments, the GUCY2C TAC protein comprises an amino acid sequence having at least 97% sequence identity with the amino acid sequence of SEQ ID NO: 569. In some embodiments, the GUCY2C TAC protein comprises an amino acid sequence having at least 98% sequence identity with the amino acid sequence of SEQ ID NO: 569. In some embodiments, the GUCY2C TAC protein comprises an amino acid sequence having at least 99% sequence identity with the amino acid sequence of SEQ ID NO: 569. In some embodiments, the GUCY2C TAC protein comprises an amino acid sequence of SEQ ID NO: 569.

[0120] In some embodiments, the GUCY2C TAC protein comprises an amino acid sequence having at least 80% sequence identity with the amino acid sequence of SEQ ID NO: 570. In some embodiments, the GUCY2C TAC protein comprises an amino acid sequence having at least 85% sequence identity with the amino acid sequence of SEQ ID NO: 570. In some embodiments, the GUCY2C TAC protein comprises an amino acid sequence having at least 90% sequence identity with the amino acid sequence of SEQ ID NO: 570. In some embodiments, the GUCY2C TAC protein comprises an amino acid sequence having at least 95% sequence identity with the amino acid sequence of SEQ ID NO: 570. In some embodiments, the GUCY2C TAC protein comprises an amino acid sequence having at least 96% sequence identity with the amino acid sequence of SEQ ID NO: 570. In some embodiments, the GUCY2C TAC protein comprises an amino acid sequence having at least 97% sequence identity with the amino acid sequence of SEQ ID NO: 570. In some embodiments, the GUCY2C TAC protein comprises an amino acid sequence having at least 98% sequence identity with the amino acid sequence of SEQ ID NO: 570. In some embodiments, the GUCY2C TAC protein comprises an amino acid sequence having at least 99% sequence identity with the amino acid sequence of SEQ ID NO: 570. In some embodiments, the GUCY2C TAC protein comprises an amino acid sequence of SEQ ID NO: 570.

[0121] In some embodiments, the GUCY2C TAC protein comprises an amino acid sequence having at least 80% sequence identity with the amino acid sequence of SEQ ID NO: 580. In some embodiments, the GUCY2C TAC protein comprises an amino acid sequence having at least 85% sequence identity with the amino acid sequence of SEQ ID NO: 580. In some embodiments, the GUCY2C TAC protein comprises an amino acid sequence having at least 90% sequence identity with the amino acid sequence of SEQ ID NO: 580. In some embodiments, the GUCY2C TAC protein comprises an amino acid sequence having at least 95% sequence identity with the amino acid sequence of SEQ ID NO: 580. In some embodiments, the GUCY2C TAC protein comprises an amino acid sequence having at least 96% sequence identity with the amino acid sequence of SEQ ID NO: 580. In some embodiments, the GUCY2C TAC protein comprises an amino acid sequence having at least 97% sequence identity with the amino acid sequence of SEQ ID NO: 580. In some embodiments, the GUCY2C TAC protein comprises an amino acid sequence having at least 98% sequence identity with the amino acid sequence of SEQ ID NO: 580. In some embodiments, the GUCY2C TAC protein comprises an amino acid sequence having at least 99% sequence identity with the amino acid sequence of SEQ ID NO: 580. In some embodiments, the GUCY2C TAC protein comprises an amino acid sequence of SEQ ID NO: 580.

[0122] In some embodiments, the GUCY2C TAC protein comprises an amino acid sequence having at least 80% sequence identity with the amino acid sequence of any one of SEQ ID NOs: 465-513, 546-590, or 686, wherein the CDR sequences of the GUCY2C TAC protein sequence have 100% sequence identity to the CDR sequences of the sequence of the SEQ ID NO. In some embodiments, the GUCY2C TAC protein comprises an amino acid sequence having at least 85% sequence identity with the amino acid sequence of any one of SEQ ID NOs: 465-513, 546-590, or 686, wherein the CDR sequences of the GUCY2C TAC protein sequence have 100% sequence identity to the CDR sequences of the sequence of the SEQ ID NO. In some embodiments, the GUCY2C TAC protein comprises an amino acid sequence having at least 90% sequence identity with the amino acid sequence of any one of SEQ ID NOs: 465-513, 546-590, or 686, wherein the CDR sequences of the GUCY2C TAC protein sequence have 100% sequence identity to the CDR sequences of the sequence of the SEQ ID NO. In some embodiments, the GUCY2C TAC protein comprises an amino acid sequence having at least 95% sequence identity with the amino acid sequence of any one of SEQ ID NOs: 465-513, 546-590, or 686, wherein the CDR sequences of the GUCY2C TAC protein sequence have 100% sequence identity to the CDR sequences of the sequence of the SEQ ID NO. In some embodiments, the GUCY2C TAC protein comprises an amino acid sequence having at least 96% sequence identity with the amino acid sequence of any one of SEQ ID NOs: 465-513, 546-590, or 686, wherein the CDR sequences of the GUCY2C TAC protein sequence have 100% sequence identity to the CDR sequences of the sequence of the SEQ ID NO. In some embodiments, the GUCY2C TAC protein comprises an amino acid sequence having at least 97% sequence identity with the amino acid sequence of any one of SEQ ID NOs: 465-513, 546-590, or 686, wherein the CDR sequences of the GUCY2C TAC protein sequence have 100% sequence identity to the CDR sequences of the sequence of the SEQ ID NO. In some embodiments, the GUCY2C TAC protein comprises an amino acid sequence having at least 98% sequence identity with the amino acid sequence of any one of SEQ ID NOs: 465-513, 546-590, or 686, wherein the CDR sequences of the GUCY2C TAC protein sequence have 100% sequence identity to the CDR sequences of the sequence of the SEQ ID NO. In some embodiments, the GUCY2C TAC protein comprises an amino acid sequence having at least 99% sequence identity with the amino acid sequence of any one of SEQ ID NOs: 465-513, 546-590, or 686, wherein the CDR sequences of the GUCY2C TAC protein sequence have 100% sequence identity to the CDR sequences of the sequence of the SEQ ID NO.

[0123] In some embodiments, the GUCY2C TAC protein comprises an amino acid sequence having at least 80% sequence identity with the amino acid sequence of SEQ ID NO: 569, wherein the CDR sequences of the GUCY2C TAC protein sequence have 100% sequence identity to the CDR sequences of the sequence of SEQ ID NO: 569. In some embodiments, the GUCY2C TAC protein comprises an amino acid sequence having at least 85% sequence identity with the amino acid sequence of SEQ ID NO: 569, wherein the CDR sequences of the GUCY2C TAC protein sequence have 100% sequence identity to the CDR sequences of the sequence of SEQ ID NO: 569. In some embodiments, the GUCY2C TAC protein comprises an amino acid sequence having at least 90% sequence identity with the amino acid sequence of SEQ ID NO: 569, wherein the CDR sequences of the GUCY2C TAC protein sequence have 100% sequence identity to the CDR sequences of the sequence of SEQ ID NO: 569. In some embodiments, the GUCY2C TAC protein comprises an amino acid sequence having at least 95% sequence identity with the amino acid sequence of SEQ ID NO: 569, wherein the CDR sequences of the GUCY2C TAC protein sequence have 100% sequence identity to the CDR sequences of the sequence of SEQ ID NO: 569. In some embodiments, the GUCY2C TAC protein comprises an amino acid sequence having at least 96% sequence identity with the amino acid sequence of SEQ ID NO: 569, wherein the CDR sequences of the GUCY2C TAC protein sequence have 100% sequence identity to the CDR sequences of the sequence of SEQ ID NO: 569. In some embodiments, the GUCY2C TAC protein comprises an amino acid sequence having at least 97% sequence identity with the amino acid sequence of SEQ ID NO: 569, wherein the CDR sequences of the GUCY2C TAC protein sequence have 100% sequence identity to the CDR sequences of the sequence of SEQ ID NO: 569. In some embodiments, the GUCY2C TAC protein comprises an amino acid sequence having at least 98% sequence identity with the amino acid sequence of SEQ ID NO: 569, wherein the CDR sequences of the GUCY2C TAC protein sequence have 100% sequence identity to the CDR sequences of the sequence of SEQ ID NO: 569. In some embodiments, the GUCY2C TAC protein comprises an amino acid sequence having at least 99% sequence identity with the amino acid sequence of SEQ ID NO: 569, wherein the CDR sequences of the GUCY2C TAC protein sequence have 100% sequence identity to the CDR sequences of the sequence of SEQ ID NO: 569.

[0124] In some embodiments, the GUCY2C TAC protein comprises an amino acid sequence having at least 80% sequence identity with the amino acid sequence of SEQ ID NO: 570, wherein the CDR sequences of the GUCY2C TAC protein sequence have 100% sequence identity to the CDR sequences of the sequence of SEQ ID NO: 570. In some embodiments, the GUCY2C TAC protein comprises an amino acid sequence having at least 85% sequence identity with the amino acid sequence of SEQ ID NO: 570, wherein the CDR sequences of the GUCY2C TAC protein sequence have 100% sequence identity to the CDR sequences of the sequence of SEQ ID NO: 570. In some embodiments, the GUCY2C TAC protein comprises an amino acid sequence having at least 90% sequence identity with the amino acid sequence of SEQ ID NO: 570, wherein the CDR sequences of the GUCY2C TAC protein sequence have 100% sequence identity to the CDR sequences of the sequence of SEQ ID NO: 570. In some embodiments, the GUCY2C TAC protein comprises an amino acid sequence having at least 95% sequence identity with the amino acid sequence of SEQ ID NO: 570, wherein the CDR sequences of the GUCY2C TAC protein sequence have 100% sequence identity to the CDR sequences of the sequence of SEQ ID NO: 570. In some embodiments, the GUCY2C TAC protein comprises an amino acid sequence having at least 96% sequence identity with the amino acid sequence of SEQ ID NO: 570, wherein the CDR sequences of the GUCY2C TAC protein sequence have 100% sequence identity to the CDR sequences of the sequence of SEQ ID NO: 570. In some embodiments, the GUCY2C TAC protein comprises an amino acid sequence having at least 97% sequence identity with the amino acid sequence of SEQ ID NO: 570, wherein the CDR sequences of the GUCY2C TAC protein sequence have 100% sequence identity to the CDR sequences of the sequence of SEQ ID NO: 570. In some embodiments, the GUCY2C TAC protein comprises an amino acid sequence having at least 98% sequence identity with the amino acid sequence of SEQ ID NO: 570, wherein the CDR sequences of the GUCY2C TAC protein sequence have 100% sequence identity to the CDR sequences of the sequence of SEQ ID NO: 570. In some embodiments, the GUCY2C TAC protein comprises an amino acid sequence having at least 99% sequence identity with the amino acid sequence of SEQ ID NO: 570, wherein the CDR sequences of the GUCY2C TAC protein sequence have 100% sequence identity to the CDR sequences of the sequence of SEQ ID NO: 570.

[0125] In some embodiments, the GUCY2C TAC protein comprises an amino acid sequence having at least 80% sequence identity with the amino acid sequence of SEQ ID NO: 580, wherein the CDR sequences of the GUCY2C TAC protein sequence have 100% sequence identity to the CDR sequences of the sequence of SEQ ID NO: 580. In some embodiments, the GUCY2C TAC protein comprises an amino acid sequence having at least 85% sequence identity with the amino acid sequence of SEQ ID NO: 580, wherein the CDR sequences of the GUCY2C TAC protein sequence have 100% sequence identity to the CDR sequences of the sequence of SEQ ID NO: 580. In some embodiments, the GUCY2C TAC protein comprises an amino acid sequence having at least 90% sequence identity with the amino acid sequence of SEQ ID NO: 580, wherein the CDR sequences of the GUCY2C TAC protein sequence have 100% sequence identity to the CDR sequences of the sequence of SEQ ID NO: 580. In some embodiments, the GUCY2C TAC protein comprises an amino acid sequence having at least 95% sequence identity with the amino acid sequence of SEQ ID NO: 580, wherein the CDR sequences of the GUCY2C TAC protein sequence have 100% sequence identity to the CDR sequences of the sequence of SEQ ID NO: 580. In some embodiments, the GUCY2C TAC protein comprises an amino acid sequence having at least 96% sequence identity with the amino acid sequence of SEQ ID NO: 580, wherein the CDR sequences of the GUCY2C TAC protein sequence have 100% sequence identity to the CDR sequences of the sequence of SEQ ID NO: 580. In some embodiments, the GUCY2C TAC protein comprises an amino acid sequence having at least 97% sequence identity with the amino acid sequence of SEQ ID NO: 580, wherein the CDR sequences of the GUCY2C TAC protein sequence have 100% sequence identity to the CDR sequences of the sequence of SEQ ID NO: 580. In some embodiments, the GUCY2C TAC protein comprises an amino acid sequence having at least 98% sequence identity with the amino acid sequence of SEQ ID NO: 580, wherein the CDR sequences of the GUCY2C TAC protein sequence have 100% sequence identity to the CDR sequences of the sequence of SEQ ID NO: 580. In some embodiments, the GUCY2C TAC protein comprises an amino acid sequence having at least 99% sequence identity with the amino acid sequence of SEQ ID NO: 580, wherein the CDR sequences of the GUCY2C TAC protein sequence have 100% sequence identity to the CDR sequences of the sequence of SEQ ID NO: 580.

[0126] In some embodiments, the GUCY2C TAC protein is encoded by a nucleic acid sequence having at least 80% sequence identity with the nucleic acid sequence of any one of SEQ ID NOs: 591-685. In some embodiments, the GUCY2C TAC protein is encoded by a nucleic acid sequence having at least 85% sequence identity with the nucleic acid sequence of any one of SEQ ID NOs: 591-685. In some embodiments, the GUCY2C TAC protein is encoded by a nucleic acid sequence having at least 90% sequence identity with the nucleic acid sequence of any one of SEQ ID NOs: 591-685. In some embodiments, the GUCY2C TAC protein is encoded by a nucleic acid sequence having at least 95% sequence identity with the nucleic acid sequence of any one of SEQ ID NOs: 591-685. In some embodiments, the GUCY2C TAC protein is encoded by a nucleic acid sequence having at least 96% sequence identity with the nucleic acid sequence of any one of SEQ ID NOs: 591-685. In some embodiments, the GUCY2C TAC protein is encoded by a nucleic acid sequence having at least 97% sequence identity with the nucleic acid sequence of any one of SEQ ID NOs: 591-685. In some embodiments, the GUCY2C TAC protein is encoded by a nucleic acid sequence having at least 98% sequence identity with the nucleic acid sequence of any one of SEQ ID NOs: 591-685. In some embodiments, the GUCY2C TAC protein is encoded by a nucleic acid sequence having at least 99% sequence identity with the nucleic acid sequence of any one of SEQ ID NOs: 591-685. In some embodiments, the GUCY2C TAC protein is encoded by a nucleic acid sequence of any one of SEQ ID NOs: 591-685.

[0127] In some embodiments, the GUCY2C TAC protein is encoded by a nucleic acid sequence having at least 80% sequence identity with the nucleic acid sequence of SEQ ID NOs: 663. In some embodiments, the GUCY2C TAC protein is encoded by a nucleic acid sequence having at least 85% sequence identity with the nucleic acid sequence of SEQ ID NOs: 663. In some embodiments, the GUCY2C TAC protein is encoded by a nucleic acid sequence having at least 90% sequence identity with the nucleic acid sequence of SEQ ID NOs: 663. In some embodiments, the GUCY2C TAC protein is encoded by a nucleic acid sequence having at least 95% sequence identity with the nucleic acid sequence of SEQ ID NOs: 663. In some embodiments, the GUCY2C TAC protein is encoded by a nucleic acid sequence having at least 96% sequence identity with the nucleic acid sequence of SEQ ID NOs: 663. In some embodiments, the GUCY2C TAC protein is encoded by a nucleic acid sequence having at least 97% sequence identity with the nucleic acid sequence of SEQ ID NOs: 663. In some embodiments, the GUCY2C TAC protein is encoded by a nucleic acid sequence having at least 98% sequence identity with the nucleic acid sequence of SEQ ID NOs: 663. In some embodiments, the GUCY2C TAC protein is encoded by a nucleic acid sequence having at least 99% sequence identity with the nucleic acid sequence of SEQ ID NOs: 663. In some embodiments, the GUCY2C TAC protein is encoded by a nucleic acid sequence of SEQ ID NOs: 663.

[0128] In some embodiments, the GUCY2C TAC protein is encoded by a nucleic acid sequence having at least 80% sequence identity with the nucleic acid sequence of SEQ ID NOs: 664. In some embodiments, the GUCY2C TAC protein is encoded by a nucleic acid sequence having at least 85% sequence identity with the nucleic acid sequence of SEQ ID NOs: 664. In some embodiments, the GUCY2C TAC protein is encoded by a nucleic acid sequence having at least 90% sequence identity with the nucleic acid sequence of SEQ ID NOs: 664. In some embodiments, the GUCY2C TAC protein is encoded by a nucleic acid sequence having at least 95% sequence identity with the nucleic acid sequence of SEQ ID NOs: 664. In some embodiments, the GUCY2C TAC protein is encoded by a nucleic acid sequence having at least 96% sequence identity with the nucleic acid sequence of SEQ ID NOs: 664. In some embodiments, the GUCY2C TAC protein is encoded by a nucleic acid sequence having at least 97% sequence identity with the nucleic acid sequence of SEQ ID NOs: 664. In some embodiments, the GUCY2C TAC protein is encoded by a nucleic acid sequence having at least 98% sequence identity with the nucleic acid sequence of SEQ ID NOs: 664. In some embodiments, the GUCY2C TAC protein is encoded by a nucleic acid sequence having at least 99% sequence identity with the nucleic acid sequence of SEQ ID NOs: 664. In some embodiments, the GUCY2C TAC protein is encoded by a nucleic acid sequence of SEQ ID NOs: 664.

[0129] In some embodiments, the GUCY2C TAC protein is encoded by a nucleic acid sequence having at least 80% sequence identity with the nucleic acid sequence of SEQ ID NOs: 674. In some embodiments, the GUCY2C TAC protein is encoded by a nucleic acid sequence having at least 85% sequence identity with the nucleic acid sequence of SEQ ID NOs: 674. In some embodiments, the GUCY2C TAC protein is encoded by a nucleic acid sequence having at least 90% sequence identity with the nucleic acid sequence of SEQ ID NOs: 674. In some embodiments, the GUCY2C TAC protein is encoded by a nucleic acid sequence having at least 95% sequence identity with the nucleic acid sequence of SEQ ID NOs: 674. In some embodiments, the GUCY2C TAC protein is encoded by a nucleic acid sequence having at least 96% sequence identity with the nucleic acid sequence of SEQ ID NOs: 674. In some embodiments, the GUCY2C TAC protein is encoded by a nucleic acid sequence having at least 97% sequence identity with the nucleic acid sequence of SEQ ID NOs: 674. In some embodiments, the GUCY2C TAC protein is encoded by a nucleic acid sequence having at least 98% sequence identity with the nucleic acid sequence of SEQ ID NOs: 674. In some embodiments, the GUCY2C TAC protein is encoded by a nucleic acid sequence having at least 99% sequence identity with the nucleic acid sequence of SEQ ID NOs: 674. In some embodiments, the GUCY2C TAC protein is encoded by a nucleic acid sequence of SEQ ID NOs: 674.

[0130] Amino acid sequences and nucleic acid sequences of exemplary GUCY2C TACs are provided in Table 7.

TABLE 7
Table of Sequences

| SEQ ID NO. | Description | Amino Acid/Nucleic Acid |
|---|---|---|
| SEQ ID NO: 591 | YU652-B06-Whitlow-TAC | Nucleotide |
| SEQ ID NO: 465 | YU652-B06-Whitlow-TAC | Amino Acid |
| SEQ ID NO: 592 | YU652-C01-Whitlow-TAC | Nucleotide |
| SEQ ID NO: 466 | YU652-C01-Whitlow-TAC | Amino Acid |
| SEQ ID NO: 593 | YU652-F02-Whitlow-TAC | Nucleotide |
| SEQ ID NO: 467 | YU652-F02-Whitlow-TAC | Amino Acid |
| SEQ ID NO: 594 | YU652-H02-Whitlow-TAC | Nucleotide |
| SEQ ID NO: 468 | YU652-H02-Whitlow-TAC | Amino Acid |
| SEQ ID NO: 595 | YU653-B12-Whitlow-TAC | Nucleotide |
| SEQ ID NO: 469 | YU653-B12-Whitlow-TAC | Amino Acid |
| SEQ ID NO: 596 | YU653-D11-Whitlow-TAC | Nucleotide |
| SEQ ID NO: 470 | YU653-D11-Whitlow-TAC | Amino Acid |
| SEQ ID NO: 597 | YU653-F12-Whitlow-TAC | Nucleotide |
| SEQ ID NO: 471 | YU653-F12-Whitlow-TAC | Amino Acid |
| SEQ ID NO: 598 | YU654-E01-Whitlow-TAC | Nucleotide |
| SEQ ID NO: 472 | YU654-E01-Whitlow-TAC | Amino Acid |
| SEQ ID NO: 599 | YU667-A01-Whitlow-TAC | Nucleotide |
| SEQ ID NO: 473 | YU667-A01-Whitlow-TAC | Amino Acid |
| SEQ ID NO: 600 | YU667-A02-Whitlow-TAC | Nucleotide |
| SEQ ID NO: 474 | YU667-A02-Whitlow-TAC | Amino Acid |
| SEQ ID NO: 601 | YU667-A04-Whitlow-TAC | Nucleotide |
| SEQ ID NO: 475 | YU667-A04-Whitlow-TAC | Amino Acid |
| SEQ ID NO: 602 | YU667-B01-Whitlow-TAC | Nucleotide |
| SEQ ID NO: 476 | YU667-B01-Whitlow-TAC | Amino Acid |
| SEQ ID NO: 603 | YU667-B02-Whitlow-TAC | Nucleotide |
| SEQ ID NO: 477 | YU667-B02-Whitlow-TAC | Amino Acid |
| SEQ ID NO: 604 | YU667-B03-Whitlow-TAC | Nucleotide |
| SEQ ID NO: 478 | YU667-B03-Whitlow-TAC | Amino Acid |
| SEQ ID NO: 605 | YU667-C04-Whitlow-TAC | Nucleotide |
| SEQ ID NO: 479 | YU667-C04-Whitlow-TAC | Amino Acid |
| SEQ ID NO: 606 | YU667-C06-Whitlow-TAC | Nucleotide |
| SEQ ID NO: 480 | YU667-C06-Whitlow-TAC | Amino Acid |
| SEQ ID NO: 607 | YU667-D05-Whitlow-TAC | Nucleotide |
| SEQ ID NO: 481 | YU667-D05-Whitlow-TAC | Amino Acid |
| SEQ ID NO: 608 | YU667-D06-Whitlow-TAC | Nucleotide |
| SEQ ID NO: 482 | YU667-D06-Whitlow-TAC | Amino Acid |
| SEQ ID NO: 609 | YU667-E01-Whitlow-TAC | Nucleotide |
| SEQ ID NO: 483 | YU667-E01-Whitlow-TAC | Amino Acid |
| SEQ ID NO: 610 | YU667-E05-Whitlow-TAC | Nucleotide |
| SEQ ID NO: 484 | YU667-E05-Whitlow-TAC | Amino Acid |
| SEQ ID NO: 611 | YU667-F02-Whitlow-TAC | Nucleotide |
| SEQ ID NO: 485 | YU667-F02-Whitlow-TAC | Amino Acid |
| SEQ ID NO: 612 | YU667-F06-Whitlow-TAC | Nucleotide |
| SEQ ID NO: 486 | YU667-F06-Whitlow-TAC | Amino Acid |
| SEQ ID NO: 613 | YU667-G02-Whitlow-TAC | Nucleotide |
| SEQ ID NO: 487 | YU667-G02-Whitlow-TAC | Amino Acid |
| SEQ ID NO: 614 | YU667-G04-Whitlow-TAC | Nucleotide |
| SEQ ID NO: 488 | YU667-G04-Whitlow-TAC | Amino Acid |
| SEQ ID NO: 615 | YU667-G06-Whitlow-TAC | Nucleotide |
| SEQ ID NO: 489 | YU667-G06-Whitlow-TAC | Amino Acid |
| SEQ ID NO: 616 | YU667-H06-Whitlow-TAC | Nucleotide |
| SEQ ID NO: 490 | YU667-H06-Whitlow-TAC | Amino Acid |
| SEQ ID NO: 617 | 6293-R4A-C2-TAC | Nucleotide |
| SEQ ID NO: 491 | 6293-R4A-C2-TAC | Amino Acid |
| SEQ ID NO: 618 | 6293-R4A-E3-TAC | Nucleotide |
| SEQ ID NO: 492 | 6293-R4A-E3-TAC | Amino Acid |
| SEQ ID NO: 619 | 6293-R4A-G4-TAC | Nucleotide |
| SEQ ID NO: 493 | 6293-R4A-G4-TAC | Amino Acid |
| SEQ ID NO: 620 | 6293-R5A-A5-TAC | Nucleotide |
| SEQ ID NO: 494 | 6293-R5A-A5-TAC | Amino Acid |
| SEQ ID NO: 621 | 6293-R5A-B6-TAC | Nucleotide |
| SEQ ID NO: 495 | 6293-R5A-B6-TAC | Amino Acid |
| SEQ ID NO: 622 | 6293-R5A-E7-TAC | Nucleotide |
| SEQ ID NO: 496 | 6293-R5A-E7-TAC | Amino Acid |
| SEQ ID NO: 623 | 6293-R5A-F6-TAC | Nucleotide |
| SEQ ID NO: 497 | 6293-R5A-F6-TAC | Amino Acid |
| SEQ ID NO: 624 | 6293-R6A-A10-TAC | Nucleotide |
| SEQ ID NO: 498 | 6293-R6A-A10-TAC | Amino Acid |
| SEQ ID NO: 625 | 6293-R6A-B11-TAC | Nucleotide |
| SEQ ID NO: 499 | 6293-R6A-B11-TAC | Amino Acid |
| SEQ ID NO: 626 | 6293-R6A-C9-TAC | Nucleotide |
| SEQ ID NO: 500 | 6293-R6A-C9-TAC | Amino Acid |
| SEQ ID NO: 627 | 6293-R6A-G9-TAC | Nucleotide |
| SEQ ID NO: 501 | 6293-R6A-G9-TAC | Amino Acid |
| SEQ ID NO: 628 | 6293-R6A-H11-TAC | Nucleotide |
| SEQ ID NO: 502 | 6293-R6A-H11-TAC | Amino Acid |
| SEQ ID NO: 629 | TI001-A23-TAC | Nucleotide |
| SEQ ID NO: 503 | TI001-A23-TAC | Amino Acid |
| SEQ ID NO: 630 | TI001-A25-TAC | Nucleotide |
| SEQ ID NO: 504 | TI001-A25-TAC | Amino Acid |
| SEQ ID NO: 631 | TI001-A28-TAC | Nucleotide |
| SEQ ID NO: 505 | TI001-A28-TAC | Amino Acid |
| SEQ ID NO: 632 | TI001-A30-TAC | Nucleotide |
| SEQ ID NO: 506 | TI001-A30-TAC | Amino Acid |
| SEQ ID NO: 633 | TI001-A48-TAC | Nucleotide |
| SEQ ID NO: 507 | TI001-A48-TAC | Amino Acid |
| SEQ ID NO: 634 | TI001-V20-TAC | Nucleotide |
| SEQ ID NO: 508 | TI001-V20-TAC | Amino Acid |
| SEQ ID NO: 635 | TI001-V30-TAC | Nucleotide |
| SEQ ID NO: 509 | TI001-V30-TAC | Amino Acid |
| SEQ ID NO: 636 | TI001-V54-TAC | Nucleotide |
| SEQ ID NO: 510 | TI001-V54-TAC | Amino Acid |
| SEQ ID NO: 637 | TI001-V65-TAC | Nucleotide |
| SEQ ID NO: 511 | TI001-V65-TAC | Amino Acid |
| SEQ ID NO: 638 | TI001-V67-TAC | Nucleotide |
| SEQ ID NO: 512 | TI001-V67-TAC | Amino Acid |
| SEQ ID NO: 639 | TI001-V68-TAC | Nucleotide |
| SEQ ID NO: 513 | TI001-V68-TAC | Amino Acid |
| SEQ ID NO: 640 | T1001-E6_HC-TAC | Nucleotide |
| SEQ ID NO: 548 | T1001-E6 HC-TAC | Amino Acid |
| SEQ ID NO: 641 | T1001-E8 HC-TAC | Nucleotide |
| SEQ ID NO: 546 | T1001-E8 HC-TAC | Amino Acid |
| SEQ ID NO: 642 | T1001-E16 HC-TAC | Nucleotide |
| SEQ ID NO: 547 | T1001-E16 HC-TAC | Amino Acid |
| SEQ ID NO: 643 | T1001-E17 HC-TAC | Nucleotide |
| SEQ ID NO: 551 | T1001-E17 HC-TAC | Amino Acid |
| SEQ ID NO: 644 | T1001-E24 HC-TAC | Nucleotide |
| SEQ ID NO: 552 | T1001-E24 HC-TAC | Amino Acid |
| SEQ ID NO: 645 | T1001-E25_HC-TAC | Nucleotide |
| SEQ ID NO: 553 | T1001-E25 HC-TAC | Amino Acid |
| SEQ ID NO: 646 | T1001-E55 HC-TAC | Nucleotide |
| SEQ ID NO: 550 | T1001-E55 HC-TAC | Amino Acid |
| SEQ ID NO: 647 | T1001-E64 HC-TAC | Nucleotide |
| SEQ ID NO: 549 | T1001-E64 HC-TAC | Amino Acid |
| SEQ ID NO: 648 | GUCY2C-TAC G7 | Nucleotide |
| SEQ ID NO: 554 | GUCY2C-TAC G7 | Amino Acid |
| SEQ ID NO: 649 | GUCY2C-TAC G8 | Nucleotide |
| SEQ ID NO: 555 | GUCY2C-TAC G8 | Amino Acid |
| SEQ ID NO: 650 | GUCY2C-TAC G9 | Nucleotide |
| SEQ ID NO: 556 | GUCY2C-TAC G9 | Amino Acid |
| SEQ ID NO: 651 | GUCY2C-TAC G10 | Nucleotide |
| SEQ ID NO: 557 | GUCY2C-TAC G10 | Amino Acid |
| SEQ ID NO: 652 | GUCY2C-TAC G11 | Nucleotide |
| SEQ ID NO: 558 | GUCY2C-TAC G11 | Amino Acid |
| SEQ ID NO: 653 | GUCY2C-TAC G12 | Nucleotide |
| SEQ ID NO: 559 | GUCY2C-TAC G12 | Amino Acid |
| SEQ ID NO: 654 | GUCY2C-TAC G13 | Nucleotide |
| SEQ ID NO: 560 | GUCY2C-TAC G13 | Amino Acid |
| SEQ ID NO: 655 | GUCY2C-TAC G14 | Nucleotide |
| SEQ ID NO: 561 | GUCY2C-TAC G14 | Amino Acid |
| SEQ ID NO: 656 | GUCY2C-TAC G15 | Nucleotide |
| SEQ ID NO: 562 | GUCY2C-TAC G15 | Amino Acid |
| SEQ ID NO: 657 | GUCY2C-TAC G16 | Nucleotide |
| SEQ ID NO: 563 | GUCY2C-TAC G16 | Amino Acid |
| SEQ ID NO: 658 | GUCY2C-TAC G17 | Nucleotide |
| SEQ ID NO: 564 | GUCY2C-TAC G17 | Amino Acid |
| SEQ ID NO: 659 | GUCY2C-TAC G18 | Nucleotide |
| SEQ ID NO: 565 | GUCY2C-TAC G18 | Amino Acid |
| SEQ ID NO: 660 | GUCY2C-TAC G19 | Nucleotide |
| SEQ ID NO: 566 | GUCY2C-TAC G19 | Amino Acid |
| SEQ ID NO: 661 | GUCY2C-TAC G20 | Nucleotide |
| SEQ ID NO: 567 | GUCY2C-TAC G20 | Amino Acid |
| SEQ ID NO: 662 | GUCY2C-TAC G21 | Nucleotide |
| SEQ ID NO: 568 | GUCY2C-TAC G21 | Amino Acid |
| SEQ ID NO: 663 | GUCY2C-TAC G22 | Nucleotide |
| SEQ ID NO: 569 | GUCY2C-TAC G22 | Amino Acid |
| SEQ ID NO: 664 | GUCY2C-TAC G23 | Nucleotide |
| SEQ ID NO: 570 | GUCY2C-TAC G23 | Amino Acid |
| SEQ ID NO: 665 | GUCY2C-TAC G24 | Nucleotide |
| SEQ ID NO: 571 | GUCY2C-TAC G24 | Amino Acid |
| SEQ ID NO: 666 | GUCY2C-TAC G25 | Nucleotide |
| SEQ ID NO: 572 | GUCY2C-TAC G25 | Amino Acid |
| SEQ ID NO: 667 | GUCY2C-TAC G26 | Nucleotide |
| SEQ ID NO: 573 | GUCY2C-TAC G26 | Amino Acid |
| SEQ ID NO: 668 | GUCY2C-TAC G27 | Nucleotide |
| SEQ ID NO: 574 | GUCY2C-TAC G27 | Amino Acid |
| SEQ ID NO: 669 | GUCY2C-TAC G28 | Nucleotide |
| SEQ ID NO: 575 | GUCY2C-TAC G28 | Amino Acid |
| SEQ ID NO: 670 | GUCY2C-TAC G29 | Nucleotide |
| SEQ ID NO: 576 | GUCY2C-TAC G29 | Amino Acid |
| SEQ ID NO: 671 | GUCY2C-TAC G30 | Nucleotide |
| SEQ ID NO: 577 | GUCY2C-TAC G30 | Amino Acid |
| SEQ ID NO: 672 | GUCY2C-TAC G31 | Nucleotide |
| SEQ ID NO: 578 | GUCY2C-TAC G31 | Amino Acid |
| SEQ ID NO: 673 | GUCY2C-TAC G32 | Nucleotide |
| SEQ ID NO: 579 | GUCY2C-TAC G32 | Amino Acid |
| SEQ ID NO: 674 | GUCY2C-TAC G33 | Nucleotide |
| SEQ ID NO: 580 | GUCY2C-TAC G33 | Amino Acid |
| SEQ ID NO: 675 | GUCY2C-TAC G34 | Nucleotide |
| SEQ ID NO: 581 | GUCY2C-TAC G34 | Amino Acid |
| SEQ ID NO: 676 | GUCY2C-TAC G35 | Nucleotide |
| SEQ ID NO: 582 | GUCY2C-TAC G35 | Amino Acid |
| SEQ ID NO: 677 | GUCY2C-TAC G36 | Nucleotide |
| SEQ ID NO: 583 | GUCY2C-TAC G36 | Amino Acid |
| SEQ ID NO: 678 | GUCY2C-TAC G37 | Nucleotide |
| SEQ ID NO: 584 | GUCY2C-TAC G37 | Amino Acid |
| SEQ ID NO: 679 | GUCY2C-TAC G38 | Nucleotide |
| SEQ ID NO: 585 | GUCY2C-TAC G38 | Amino Acid |
| SEQ ID NO: 680 | GUCY2C-TAC G39 | Nucleotide |
| SEQ ID NO: 586 | GUCY2C-TAC G39 | Amino Acid |
| SEQ ID NO: 681 | GUCY2C-TAC G40 | Nucleotide |
| SEQ ID NO: 587 | GUCY2C-TAC G40 | Amino Acid |
| SEQ ID NO: 682 | GUCY2C-TAC G41 | Nucleotide |
| SEQ ID NO: 588 | GUCY2C-TAC G41 | Amino Acid |
| SEQ ID NO: 683 | GUCY2C-TAC G42 | Nucleotide |
| SEQ ID NO: 589 | GUCY2C-TAC G42 | Amino Acid |
| SEQ ID NO: 684 | GUCY2C-TAC G43 | Nucleotide |
| SEQ ID NO: 590 | GUCY2C-TAC G43 | Amino Acid |
| SEQ ID NO: 685 | GUCY2C-TAC G44 | Nucleotide |
| SEQ ID NO: 686 | GUCY2C-TAC G44 | Amino Acid |

### Vector Constructs

[0131] Disclosed herein, in certain embodiments, are vectors comprising a GUCY2C TAC nucleic acid sequence as disclosed herein. In some embodiments, the vectors further comprise a promoter. In some embodiments, the promoter is functional in a mammalian cell. Promoters, regions of DNA that initiate transcription of a particular nucleic acid sequence, are well known in the art. A “promoter functional in a mammalian cell” refers to a promoter that drives expression of the associated nucleic acid sequence in a mammalian cell. A promoter that drives expression of a nucleic acid sequence is referred to as being “operably connected” to the nucleic acid sequence.

[0132] A variety of delivery vectors and expression vehicles are employed to introduce nucleic acids described herein into a cell.

[0133] Disclosed herein, in certain embodiments, are vectors comprising:
[0134] (a) a first polynucleotide encoding an antigen-binding domain that binds GUCY2C;
[0135] (b) a second polynucleotide encoding an antigen-binding domain that binds a protein associated with a TCR complex;
[0136] (c) a third polynucleotide encoding a T cell receptor signaling domain polypeptide; and
[0137] (d) a promoter that is functional in a mammalian cell.

[0138] In some embodiments, the first polynucleotide and third polynucleotide are fused to the second polynucleotide and the coding sequence is operably connected to the promoter. In some embodiments, the second polynucleotide and third polynucleotide are fused to the first polynucleotide and the coding sequence is operably connected to the promoter. In some embodiments, the vector is designed for expression in mammalian cells. In some embodiments, the vector is a viral vector. In some embodiments, the viral vector is a retroviral vector.

[0139] In some embodiments, vectors that are useful comprise vectors derived from retroviruses, lentiviruses, Murine Stem Cell Viruses (MSCV), pox viruses, adenoviruses, and adeno-associated viruses. Other delivery vectors that are useful comprise vectors derived from herpes simplex viruses, transposons, vaccinia viruses, human papilloma virus, Simian immunodeficiency viruses, HTLV, human foamy virus and variants thereof. Further vectors that are useful comprise vectors derived from spumaviruses, mammalian type B retroviruses, mammalian type C retroviruses, avian type C retroviruses, mammalian type D retroviruses and HTLV/BLV type retroviruses. One example of a lentiviral vector useful in the disclosed compositions and methods is the pCCL4 vector.

### Pharmaceutical Compositions

[0140] Disclosed herein, in certain embodiments, are pharmaceutical compositions comprising an engineered T cell disclosed herein (transduced with and/or expressing a GUCY2C TAC polypeptide), and a pharmaceutically acceptable carrier. Pharmaceutically acceptable carriers include, but are not limited to, buffers such as neutral buffered saline, phosphate buffered saline and the like; carbohydrates such as glucose, mannose, sucrose or dextrans, mannitol; proteins; polypeptides or amino acids such as glycine; antioxidants; chelating agents such as EDTA or glutathione; adjuvants (e.g., aluminum hydroxide); or preservatives. In some embodiments, the engineered T cells are formulated for intravenous administration.

[0141] Pharmaceutical compositions are administered in a manner appropriate to the disease to be treated (or prevented). The quantity and frequency of administration is determined by such factors as the condition of the patient, and the type and severity of the patient's disease, although appropriate dosages are determined by clinical trials. When “an immunologically effective amount,” “an anti-tumor effective amount,” “a tumor-inhibiting effective amount,” or “therapeutic amount” is indicated, the precise amount of the compositions of the present invention to be administered is determined by a physician with consideration of individual differences in age, weight, tumor size, extent of infection or metastasis, and condition of the patient (subject).

[0142] In some embodiments, the engineered T cells and/or pharmaceutical compositions described herein are administered at a dosage of 10¹ to 10¹⁵ cells per kg body weight, 10⁴ to 10⁹ cells per kg body weight, optionally 10⁵ to 10⁸ cells per kg body weight, 10⁶ to 10⁷ cells per kg body weight or 10⁵ to 10⁶ cells per kg body weight, including all integer values within those ranges. In some embodiments, the modified T cells and/or pharmaceutical compositions described herein are administered at a dosage of greater than 10¹ cells per kg body weight. In some embodiments, the modified T cells and/or pharmaceutical compositions described herein are administered at a dosage of less than 10¹⁵ cells per kg body weight.

[0143] In some embodiments, the engineered T cells and/or pharmaceutical compositions described herein are administered at a dosage of 0.5×10⁶ cells, 2×10⁶ cells, 4×10⁶ cells, 5×10⁶ cells, 1.2×10⁷ cells, 2×10⁷ cells, 5×10⁷ cells, 2×10⁸ cells, 5×10⁸ cells, 2×10⁹ cells, 0.5-2000×10⁶ cells, 0.5-2×10⁶ cells, 0.5-2×10⁷ cells, 0.5-2×10⁸ cells, or 0.5-2×10⁹ cells, including all integer values within those ranges.

[0144] Also disclosed herein are pharmaceutical compositions comprising engineered/modified and unmodified T cells, or comprising different populations of engineered/modified T cells with or without unmodified T cells. One of ordinary skill in the art would understand that a therapeutic quantity of engineered/modified T cells need not be homogenous in nature.

[0145] In some embodiments, T cell compositions are administered multiple times at these dosages. In some embodiments, the dosage is administered a single time or multiple times, for example daily, weekly, biweekly, or monthly, hourly, or is administered upon recurrence, relapse or progression of the cancer being treated. The cells, in some embodiments, are administered by using infusion techniques that are commonly known in immunotherapy (see, e.g., Rosenberg et al., New Eng. J. of Med. 319:1676, 1988).

[0146] In some embodiments, the pharmaceutical composition is substantially free of, e.g., there are no detectable levels of a contaminant, e.g., selected from the group consisting of endotoxin, mycoplasma, replication competent lentivirus (RCL), p24, VSV-G nucleic acid, HIV gag, residual anti-CD3/anti-CD28 coated beads, mouse antibodies, pooled human serum, bovine serum albumin, bovine serum, culture media components, vector packaging cell or plasmid components, a bacterium a fungus, mycoplasma, IL-2, and IL-7.

[0147] In some embodiments, the modified/engineered T cells and/or pharmaceutical compositions are administered by methods including, but not limited to, aerosol inhalation, injection, infusion, ingestion, transfusion, implantation or transplantation. The modified T cells and/or pharmaceutical compositions may be administered to a subject transarterially, subcutaneously, intradermally, intratumorally, intranodally, intrameduliary, intramuscularly, by intravenous (i.v.) injection, by intravenous (i.v.) infusion, or intraperitoneally. The modified/engineered T cells and/or pharmaceutical compositions thereof may be administered to a patient by intradermal or subcutaneous injection. The modified/engineered T cells and/or pharmaceutical compositions thereof may be administered by i.v. injection. The modified/engineered T cells and/or pharmaceutical compositions thereof may be injected directly into a tumor, lymph node, or site of infection.

[0148] A pharmaceutical composition may be prepared by known methods for the preparation of pharmaceutically acceptable compositions that are administered to subjects, such that an effective quantity of the T cells is combined in a mixture with a pharmaceutically acceptable carrier. Suitable carriers are described, for example, in Remington's Pharmaceutical Sciences (Remington's Pharmaceutical Sciences, 20^{th} ed., Mack Publishing Company, Easton, Pa., USA, 2000). On this basis, the compositions may include, albeit not exclusively, solutions of the substances in association with one or more pharmaceutically acceptable carriers or diluents, and contained in buffered solutions with a suitable pH and iso-osmotic with the physiological fluids.

[0149] Suitable pharmaceutically acceptable carriers include essentially chemically inert and nontoxic compositions that do not interfere with the effectiveness of the biological activity of the pharmaceutical composition. Examples of suitable pharmaceutical carriers include, but are not limited to, water, saline solutions, glycerol solutions, N-(1 (2,3-dioleyloxy)propyl)N,N,N-trimethylammonium chloride (DOTMA), diolesylphosphotidyl-ethanolamine (DOPE), and liposomes. In some embodiments, such compositions contain a therapeutically effective amount of the compound, together with a suitable amount of carrier so as to provide the form for direct administration to the patient.

[0150] Pharmaceutical compositions include, without limitation, lyophilized powders or aqueous or non-aqueous sterile injectable solutions or suspensions, which may further contain antioxidants, buffers, bacteriostats and solutes that render the compositions substantially compatible with the tissues or the blood of an intended recipient. Other components that may be present in such compositions include water, surfactants (such as Tween), alcohols, polyols, glycerin and vegetable oils, for example. Extemporaneous injection solutions and suspensions may be prepared from sterile powders, granules, tablets, or concentrated solutions or suspensions.

[0151] A pharmaceutical composition disclosed herein may be formulated into a variety of forms and administered by a number of different means. A pharmaceutical formulation may be administered orally, rectally, or parenterally, in formulations containing conventionally acceptable carriers, adjuvants, and vehicles as desired. The term “parenteral” as used herein includes subcutaneous, intravenous, intramuscular, or intrasternal injection and infusion techniques. Administration includes injection or infusion, including intra-arterial, intracardiac, intracerebroventricular, intradermal, intraduodenal, intramedullary, intramuscular, intraosseous, intraperitoneal, intrathecal, intravascular, intravenous, intravitreal, epidural and subcutaneous), inhalational, transdermal, transmucosal, sublingual, buccal and topical (including epicutaneous, dermal, enema, eye drops, ear drops, intranasal, vaginal) administration. In some exemplary embodiments, a route of administration is via an injection such as an intramuscular, intravenous, subcutaneous, or intraperitoneal injection.

[0152] Liquid formulations include an oral formulation, an intravenous formulation, an intranasal formulation, an ocular formulation, an otic formulation, an aerosol, and the like. In certain embodiments, a combination of various formulations is administered. In certain embodiments a composition is formulated for an extended release profile.

### Methods of Treatment and Use

[0153] Disclosed herein, in certain embodiments, are methods of using engineered T cells disclosed herein in the treatment of a GUCY2C-expressing cancer in an individual in need thereof.

[0154] In some embodiments, an antigen-binding domain that binds GUCY2C of a TAC polypeptide disclosed herein binds to GUCY2C on a tumor cell. In some embodiments, an antigen-binding domain that binds GUCY2C of a TAC polypeptide disclosed herein selectively binds to GUCY2C on a tumor cell.

[0155] Disclosed herein, in certain embodiments, are methods of treating a cancer expressing GUCY2C in an individual in need thereof, comprising administering to the individual an engineered T cell disclosed herein or a pharmaceutical composition comprising an engineered T cell disclosed herein.

[0156] Further disclosed herein is use of an engineered T cell disclosed herein in the preparation of a medicament to treat cancer expressing GUCY2C in an individual in need thereof. Additionally disclosed herein in certain embodiments is the use of an engineered T cell disclosed herein or a pharmaceutical composition disclosed herein to treat a cancer expressing GUCY2C in an individual in need thereof.

[0157] In some embodiments, the engineered T cells disclosed herein are part of a combination therapy. In some embodiments, effectiveness of a therapy disclosed herein is assessed multiple times. In some embodiments, patients are stratified based on a response to a treatment disclosed herein. In some embodiments, an effectiveness of treatment determines entrance into a trial.

[0158] In some embodiments, the engineered T cells disclosed herein are administered in combination with a lymphodepleting therapy, or are administered to a subject who has received a lymphodepleting therapy. Examples of lymphodepleting therapies include nonmyeloablative lymphodepleting chemotherapy, myeloablative lymphodepleting chemotherapy, fludarabine, cyclophosphamide, corticosteroids, alemtuzumab, total body irradiation (TBI), and any combination thereof.

[0159] Cancers that may be treated with engineered T cells disclosed herein include any form of neoplastic disease. In some embodiments, the cancer is a primary colorectal cancer, a primary gastric cancer, a primary gastroesophageal junction cancer, a primary esophageal cancer, or a primary pancreatic cancer. In some embodiments, the cancer is a metastatic colorectal cancer, a metastatic gastric cancer, a metastatic gastroesophageal junction cancer, a metastatic esophageal cancer, or a metastatic pancreatic cancer.

[0160] In some embodiments, the cancer that is to be treated is a primary colorectal cancer. Colorectal cancer affects both men and women, and is responsible for 9.2% of all cancer deaths. The lack of response to targeted therapy, such as anti-EGFR antibodies, has been correlated with mutations in the KRAS and BRAF oncogenes. In addition, immunotherapies, such as immune checkpoint inhibitors, have failed to show significant survival benefit in most patients with colorectal cancer, owing to low tumor mutational burden and reduced density of immune infiltration. Guanylyl Cyclase C (GUCY2C) is overexpressed in more than 90% of colorectal cancers across all stages.

[0161] In some embodiments, the cancer that is to be treated is a primary gastric cancer, for example a primary gastroesophageal junction cancer. Gastric cancers are the 6^{th} most common cancer in the world, and the second-leading cause of cancer-related deaths worldwide. In most of the world, stomach cancers form in the main part of the stomach (stomach body). In the United States, stomach cancer is more likely to affect the area where the esophagus meets the stomach, i.e., gastroesophageal junction cancer. Many gastric cancers evolve from intestinal metaplasia resulting in over 50% of gastric cancers and gastroesophageal junction cancers being characterized by ectopic over-expression of GUCY2C.

[0162] In some embodiments, the cancer that is to be treated is a primary pancreatic cancer. Pancreatic cancer has the highest mortality rate of all major cancers. For all stages combined, the 5-year relative survival rate is 10%. For people diagnosed with local disease, the 5-year survival is only 39%. Many pancreatic cancers evolve from intestinal metaplasia resulting in over 50% of pancreatic cancers being characterized by overexpression of GUCY2C.

### EXAMPLES

[0163] The following examples are given for the purpose of illustrating various embodiments of the invention and are not meant to limit the present invention in any fashion. The present examples, along with the methods described herein are presently representative of preferred embodiments, are exemplary, and are not intended as limitations on the scope of the invention. Changes therein and other uses which are encompassed within the spirit of the invention as defined by the scope of the claims will occur to those skilled in the art.

### Example 1: Manufacturing of GUCY2C-TAC T Cells

[0164] T cells were engineered with lentiviral vectors to express a variety of GUCY2C-TAC receptors listed in Table 8. Surface expression was analyzed via flow cytometry (FIG. 1). Results show that T cells expressed the 34 GUCY2C-TACs of Table 8.

TABLE 8

| TAC ID | Binding Domain | Sequence ID |
|---|---|---|
| G7 | muScFv | SEQ ID NO: 554 |
| G9 | muScFv | SEQ ID NO: 556 |
| G10 | muScFv | SEQ ID NO: 557 |
| G11 | muScFv | SEQ ID NO: 558 |
| G12 | muScFv | SEQ ID NO: 559 |
| G13 | muScFv | SEQ ID NO: 560 |
| G14 | muScFv | SEQ ID NO: 561 |
| G16 | Nanobody | SEQ ID NO: 563 |
| G17 | Nanobody | SEQ ID NO: 564 |
| G18 | Nanobody | SEQ ID NO: 565 |
| G19 | Nanobody | SEQ ID NO: 566 |
| G21 | Nanobody | SEQ ID NO: 568 |
| G22 | Nanobody | SEQ ID NO: 569 |
| G23 | Nanobody | SEQ ID NO: 570 |
| G25 | huScFv | SEQ ID NO: 572 |
| G26 | huScFv | SEQ ID NO: 573 |
| G27 | huScFv | SEQ ID NO: 574 |
| G28 | huScFv | SEQ ID NO: 575 |
| G29 | huScFv | SEQ ID NO: 576 |
| G30 | huScFv | SEQ ID NO: 577 |
| G31 | huScFv | SEQ ID NO: 578 |
| G32 | huScFv | SEQ ID NO: 579 |
| G33 | huScFv | SEQ ID NO: 580 |
| G34 | huScFv | SEQ ID NO: 581 |
| G35 | huScFv | SEQ ID NO: 582 |
| G36 | huScFv | SEQ ID NO: 583 |
| G37 | huScFv | SEQ ID NO: 584 |
| G38 | huScFv | SEQ ID NO: 585 |
| G39 | huScFv | SEQ ID NO: 586 |
| G40 | huScFv | SEQ ID NO: 587 |
| G41 | huScFv | SEQ ID NO: 588 |
| G42 | huScFv | SEQ ID NO: 589 |
| G43 | huScFv | SEQ ID NO: 590 |
| G44 | Nanobody | SEQ ID NO: 686 |

### Example 2: In Vitro Activation of GUCY2C-TAC T Cells

[0165] T cells were engineered to express the GUCY2C-TAC receptors listed in Table 8. T cell activation was measured as a function of the upregulation of the early T cell activation marker, CD69. GUCY2C-TAC T cells were co-cultured at a 1:1 E:T ratio with a variety of tumor cell lines expressing GUCY2C (N87^{GUCY2C}, NALM6^{GUCY2C}). Following a 4-hour co-culture, GUCY2C-TAC T cells were harvested and analyzed for CD69 surface expression by flow cytometry. As shown in FIGS. 2A-2B, GUCY2C-TAC T cells were activated when co-cultured with GUCY2C-positive target cells NALM6^{GUCY2C} (FIG. 2A) and N87^{GUCY2C} (FIG. 2B). Activation was not observed with GUCY2C negative control cells. The observed activation varied across all tested GUCY2C-TAC T cells. When stimulated with GUCY2C-positive target cells, GUCY2C-TAC T cells were able to induce the activation of non-transduced T cells in that same T cell populations.

### Example 3: In Vitro Expansion of GUCY2C-TAC T Cells

[0166] T cells were engineered to express a variety of GUCY2C-TAC receptors (Table 8). Proliferation of GUCY2C-TAC T cells co-cultured in a 1:3 E:T ratio for 4 days with NALM6^{GUCY2C} was evaluated. NALM6^{GUCY2C} is a leukemic cell line that was engineered to overexpress a truncated version of GUCY2C lacking the cytosolic domains. The parental NALM6 cell line lacking GUCY2C expression was used as negative control. GUCY2C-TAC T cells were evaluated via the CTV (cell trace violet) proliferation assay. Target cells were inactivated using mitomycin C, and T cells were loaded with CTV dye prior to co-culture with target cells at a 1: E:T ratio. After a 4-day co-culture, T cells were analyzed via flow cytometry. Results of the CTV proliferation assay were quantified (FIG. 3A), and representative examples are shown (FIG. 3B). The division index (DI), a measure of proliferation from all GUCY2C-TAC T cells was normalized to the division index of cells grown in the absence of target cells (FIG. 3A). The observed proliferation varied across all tested GUCY2C-TAC T cells. The majority of GUCY2C-TAC T cells showed proliferation, including several GUCY2C-TAC T cell candidates with high proliferative activity. No proliferation was observed against GUCY2C-negative control cells. GUCY2C-TAC G23 (SEQ ID NO: 570) and GUCY2C-TAC G36 (SEQ ID NO: 583) T cells showed various levels of proliferation relative to the positive control of CD19-TAC T cells. No proliferation was observed in the HER2-TAC negative control cells.

### Example 4: In Vitro Cytotoxicity of GUCY2C-TAC T Cells

[0167] T cells were engineered to express GUCY2C-TAC receptors listed in Table 8. GUCY2C-TAC T cells were co-cultured at E:T ratios 1:10 and 1:20 with 1×10⁴ NALM6^{GUCY2C-GFPeLuc} target cells/well in a cell imaging reader. Photos were captured every 8 hours for 5 days. The area of GFP-expressing cells is calculated for each time point and E:T ratio. From these values, the area under the curve (AUC) for each of the GUCY2C-TAC T cells was calculated and plotted, representing target cell killing at each E:T ratio. Data shows percentage target cell killing of the GUCY2C-TAC T cells at E:T ratio of 1:10 (FIG. 4). The tested GUCY2C-TAC T cells showed varying levels of cytotoxicity. No cytotoxicity was observed against GUCY2C negative control cells. The positive control, CD19-TAC, showed nearly 100% killing of target cells at E:T of 1:10. NTD is shown as the negative control.

### Example 5: Antigen-Specific In Vitro Activation of GUCY2C-TAC T Cells

[0168] T cells were engineered to express GUCY2C-TAC receptors G22 (SEQ ID NO: 569), G23 (SEQ ID NO: 570), G26 (SEQ ID NO: 573), G32 (SEQ ID NO: 579), or G33 (SEQ ID NO: 580). T cell activation was measured as a function of the upregulation of the early T cell activation marker, CD69. T cells expressing the GUCY2C-TAC were co-cultured at a 1:1 E:T ratio with a variety of tumor cell lines expressing GUCY2C (NCI-N87^{GUCY2C}, NALM6^{GUCY2C}) Following a 4 hour co-culture, GUCY2C-TAC T cells were harvested and analyzed for CD69 surface expression by flow cytometry. As shown in FIG. 5, T cells expressing GUCY2C-TAC were activated when co-cultured with both GUCY2C positive target cells, N87^{GUCY2C} and NALM6^{GUCY2C}, but not with GUCY2C negative control cells, NALM6. All 5 tested GUCY2C-TAC T cell variants were activated in response to GUCY2C-expressing tumor cells, comparable to the relevant positive controls (i.e., HER2-TAC for N87^{GUCY2C}; CD19-TAC T for NALM6^{GUCY2C} target cells).

### Example 6: Antigen-Specific In Vitro Expansion of GUCY2C-TAC T Cells

[0169] T cells were engineered to express GUCY2C-TAC receptors G22 (SEQ ID NO: 569), G23 (SEQ ID NO: 570), G26 (SEQ ID NO: 573), G32 (SEQ ID NO: 579), or G33 (SEQ ID NO: 580). GUCY2C-TAC T cells were evaluated via the CTV proliferation assay. Target cells (N87^{GUCY2}C, NALM6^{GUCY2C}) were inactivated using mitomycin, and T cells were loaded with cell tracing (CTV) dye prior to co-culture with target cells at a 1:3 E:T ratio. After a 4 day co-culture T cells were analyzed via flow cytometry. Results of the CTV proliferation assay were quantified (FIG. 6).

[0170] The division index (DI) was normalized to the respective positive controls (HER2-TAC for N87^{GUCY2C} and CD19-TAC for NALM6^{GUCY2C}). All 5 tested GUCY2C-TAC T cell products proliferated upon co-culture with GUCY2C-expressing target cells. No proliferation was observed against GUCY2C negative control cells.

### Example 7. Antigen-Specific In Vitro Cytotoxicity of GUCY2C-TAC T Cells

[0171] T cells were engineered to express GUCY2C-TAC receptors G22 (SEQ ID NO: 569), G23 (SEQ ID NO: 570), G26 (SEQ ID NO: 573), G32 (SEQ ID NO: 579), or G33 (SEQ ID NO: 580). GUCY2C-TAC T cells were co-cultured at E:T ratios 1:5, 1:10 and 1:20 with 1×10⁴ NALM6^{GUCY2C-GFPeLuc} target cells/well in a cell imaging reader. Photos were captured every 8 hours for 5 days. The area of GFP-expressing cells is calculated for each time point and E:T ratio. From these values, the area under the curve (AUC) for each of the GUCY2C-TAC T cells was calculated, normalized to target cells alone and plotted, representing target cell killing at each E:T ratio. FIG. 7 shows exemplary results of GUCY2C-TAC Nanobody 7 (closed circles), GUCY2C-TAC Nanobody 8 (closed squares), GUCY2C-TAC huScFV 2 (closed triangles), GUCY2C-TAC huScFV 8 (closed inverted triangles), and GUCY2C-TAC huScFV 9 (closed diamonds). Data shown demonstrate the different levels of target cell killing dependent on the E:T ratios used. NTD negative controls cells show no cytotoxicity. The graph demonstrated that all tested GUCY2C-TAC T cells show cytotoxicity, with some variants being close to the cytotoxicity observed by the positive control CD19-TAC T cells.

### Example 8: In Vitro Activity of GUCY2C-TAC T Cells Against Various Tumor Cell Types Endogenously Expressing GUCY2C

[0172] The natural surface expression levels of GUCY2C on T84, LS174T (colon carcinoma), LS1034 (colorectal carcinoma) cell lines were measured and activation of GUCY2C-TAC T cells against the cells was analyzed. Engineered cell lines N87^{GUCY2C} and NALM6^{GUCY2C} were used as positive control. Dotted lines represent secondary antibody only and were used as negative control. Natural cell lines showed surface expression levels that were above background, which indicates lower expression levels compared to the engineered positive controls (FIG. 8A).

[0173] T cells were engineered to express GUCY2C-TAC receptors G22 (SEQ ID NO: 569), G23 (SEQ ID NO: 570), or G33 (SEQ ID NO: 580). GUCY2C-TAC T cells were co-cultured at a 1:1 ratio with the GUCY2C-expressing cells (FIG. 8A), while GUCY2C-negative NALM6 cells were used as negative control. Following a 4-hour co-culture, GUCY2C-TAC T cells were harvested and analyzed for CD69 surface expression by flow cytometry. As shown in FIG. 8B, GUCY2C-TAC T cells were activated when co-cultured with the GUCY2C-positive target cells. The level of activation varied across cell lines with T84 cells inducing the lowest level of activation, while LS1034 cells induced the highest levels of T cell activation. With the exception of the LS174T cell line, GUCY2C-TAC T cell activation was comparable with the respective positive control TAC T cells. Neither NTD negative controls nor T cells alone showed activation.

### Example 9: In Vitro Screening of GUCY2C-TACs

[0174] T cells are engineered to express GUCY2C-TAC receptors (e.g., any one of SEQ ID NOs: 465-513, 546-590, or 686). T cell activation is measured as a function of the upregulation of the early T cell activation marker, CD69. Engineered T cells are co-cultured at a 1:1 E:T ratio with target cells expressing GUCY2C or negative control cells that do not express GUCY2C. Following a 4-hour co-culture, GUCY2C-TAC T cells are harvested and analyzed for CD69 surface expression by flow cytometry. Expansion of GUCY2C-TAC T cells is evaluated via the CTV proliferation assay. GUCY2C-positive target cells or GUCY2C-negative control cells are inactivated using mitomycin C, and T cells are loaded with CTV dye prior to co-culture with target or control cells at a 3:1 E:T ratio. After a 4-day co-culture, T cells are analyzed via flow cytometry. GFP/Luc-expressing GUCY2C-positive target cells or GUCY2C-negative control cells are used to assess cytotoxicity induced by TAC T cells in a cell imaging reader. Photos are captured every 8 hours for 5 days. The area of GFP-expressing cells is calculated for each time point and E:T ratio. From these values, the area under the curve (AUC) for each of the GUCY2C-TAC T cells is calculated and plotted, representing target cell killing at each E:T ratio. Results are analyzed to compare the relative effects of the GUCY2C-TAC T cells on GUCY2C-positive target cells or GUCY2C-negative control cells.

### Example 10: In Vivo Activity of GUCY2C-TAC T Cells in Mammalian Subjects

[0175] T cells are engineered to express GUCY2C-TAC receptors (e.g., any one of SEQ ID NOs: 465-513, 546-590, or 686). Mice are inoculated with 5×10⁵-1×10⁷ GUCY2C-expressing tumor cells. Four days after engraftment, mice are treated with a single intravenous dose of GUCY2C-TAC T cells. Non-treated (NT) mice and mice treated with non-transduced T cells (NTD) are used as negative controls. Mice are dosed with 4×10⁶ TAC T cells or an equivalent number of NTD cells that matches the total T cell dose used for TAC T cells. Total luminescence is measured weekly. The resulting total flux (photons/second) as the sum of the dorsal and ventral reads, overall survival, and relative change in body weight as a means to assess toxicity are measured. Results are analyzed to compare animals treated with GUCY2C-TAC T cells to NT and NTD animals.

### Example 11: Treatment of Human Subjects with GUCY2C-TAC T Cells

[0176] A human subject having a GUCY2C-expressing primary colorectal cancer presents. Autologous T cells are engineered to express a GUCY2C-TAC receptor (e.g., any one of SEQ ID NOs: 465-513, 546-590, or 686) and expression of the TAC is confirmed. The subject is administered lymphodepleting chemotherapy followed by administration of TAC-expressing T cells at an appropriate dose. The subject is monitored for toxicity and disease progression.

Sequence Listing

| SEQ | Nucleotide/ | |
|---|---|---|
| ID | Amino | |
| NO | Acid | Sequence |
| 1 | Nucleotide | ATGGATTTCCAGGTCCAGATTTTCTCCTTCCTGCT |
| | | GATTTCCGCAAGCGTCATT |
| 2 | Amino Acid | MDFQVQIFSFLLISASVI |
| 3 | Nucleotide | GAACAGAAACTGATTAGCGAAGAAGACCTG |
| 4 | Amino Acid | EQKLISEEDL |
| 5 | Nucleotide | ACTAGTGGCGGAGGAGGATCACTCGAG |
| 6 | Amino Acid | TSGGGGSLE |
| 7 | Nucleotide | AACCCCGGGGGAGGAGGAGGGAGCGGGGGAGGAGG |
| | | CAGCGGCGGGGGAGGCTCTGGAGGAGGAGGGAGCG |
| | | GATCC |
| 8 | Amino Acid | NPGGGGGSGGGGSGGGGSGGGGSGS |
| 9 | Nucleotide | AGCGGACAGGTGCTGCTGGAATCCAATATCAAAGT |
| | | CCTGCCCACTTGGTCTACCCCCGTGCAGCCT |
| 10 | Amino Acid | SGQVLLESNIKVLPTWSTPVQP |
| 11 | Nucleotide | GCCGAAGCAGCAGCAAAGGAGGCCGCAGCGAAGGA |
| | | AGCAGCTGCGAAGGCC |
| 12 | Amino Acid | AEAAAKEAAAKEAAAKA |
| 13 | Nucleotide | GCCGAGGCAGCTGCAAAGGAAGCTGCGGCGAAGGA |
| | | GGCCGCAGCGAAAGAAGCAGCGGCAAAAGAAGCAG |
| | | CCGCCAAAGCC |
| 14 | Amino Acid | AEAAAKEAAAKEAAAKEAAAKEAAAKA |
| 15 | Nucleotide | ATCGTAGTGTTGGCATTTCAAAAAGCGTCTAGCAT |
| | | CGTCTATAAGAAGGAAGGTGAACAAGTCGAGTTTT |
| | | CTTTCCCCCTTGCATTTACGGTGGAAAAGCTTACG |
| | | GGTAGCGGCGAGCTGTGGTGGCAAGCTGAACGGGC |
| | | TTCAAGCTCAAAATCTTGGATTACTTTTGACTTGA |
| | | AGAACAAAGAGGTGAGTGTCAAAAGAGTTACTCAG |
| | | GACCCAAAGCTTCAAATGGGGAAGAAACTTCCGCT |
| | | GCACCTGACGTTGCCTCAGGCCCTGCCTCAATATG |
| | | CCGGCTCAGGCAATCTGACCCTCGCGCTGGAAGCT |
| | | AAGACCGGAAAATTGCACCAGGAAGTCAATTTGGT |
| | | TGTGATGCGCGCCACTCAGCTCCAAAAAAATCTCA |
| | | CTTGCGAGGTATGGGGGCCTACGAGCCCAAAACTT |
| | | ATGCTGTCTTTGAAGCTTGAAAACAAGGAAGCGAA |
| | | AGTTTCTAAGCGCGAGAAAGCGGTATGGGTTTTGA |
| | | ATCCTGAGGCTGGAATGTGGCAATGCCTCCTGAGC |
| | | GATAGCGGGCAGGTGCTGTTGGAGAGCAACATCAA |
| | | GGTTTTGCCAGCAGCC |
| 16 | Amino Acid | IVVLAFQKASSIVYKKEGEQVEFSFPLAFTVEKLT |
| | | GSGELWWQAERASSSKSWITFDLKNKEVSVKRVTQ |
| | | DPKLQMGKKLPLHLTLPQALPQYAGSGNLTLALEA |
| | | KTGKLHQEVNLVVMRATQLQKNLTCEVWGPTSPKL |
| | | MLSLKLENKEAKVSKREKAVWVLNPEAGMWQCLLS |
| | | DSGQVLLESNIKVLPAA |
| 17 | Nucleotide | ATGGAGACCCCCGCCCAGCTGCTGTTCCTGCTGCT |
| | | GCTGTGGCTGCCCGACACCACCGGC |
| 18 | Amino Acid | METPAQLLFLLLLWLPDTTG |
| 19 | Nucleotide | ATGGCCCTGCCAGTGACCGCCCTGCTGCTGCCACT |
| | | GGCCCTGCTGCTGCACGCCGCCAGACCC |
| 20 | Amino Acid | MALPVTALLLPLALLLHAARP |
| 21 | Nucleotide | GGATCTACCAGCGGATCCGGCAAGCCTGGCAGCGG |
| | | AGAGGGATCCACAAAGGGA |
| 22 | Amino Acid | GSTSGSGKPGSGEGSTKG |
| 23 | Nucleotide | ggcggcggcggaagtggaggaggaggctcaggcgg |
| | | aggagggagc |
| 24 | Amino Acid | GGGGSGGGGSGGGGS |
| 25 | Nucleotide | ggaggaggagggagcgggggaggaggcagcggcgg |
| | | gggaggctctggaggaggagggagc |
| 26 | Amino Acid | GGGGSGGGGSGGGGSGGGGS |
| 27 | Nucleotide | GGAGGAGGAGGGAGC |
| 28 | Amino Acid | GGGGS |
| 29 | Nucleotide | ATGGCCCTGCCAGTGACCGCCCTGCTGCTGCCACT |
| | | GGCCCTGCTGCTGCACGCCGCCCGGCCT |
| 30 | Amino Acid | MALPVTALLLPLALLLHAARP |
| 31 | Nucleotide | ATGGACATCCAGATGACTCAGACCACAAGCTCCCT |
| | | GTCTGCAAGTCTGGGCGACCGGGTGACAATCTCCT |
| | | GCAGAGCCTCTCAGGATATTAGGAACTACCTGAAT |
| | | TGGTATCAGCAGAAACCTGATGGCACAGTCAAGCT |
| | | GCTGATCTACTATACCAGCCGGCTGCACTCAGGCG |
| | | TGCCAAGCAAATTCTCAGGAAGCGGCTCCGGGACT |
| | | GACTACTCCCTGACCATCTCTAACCTGGAGCAGGA |
| | | AGATATTGCTACCTATTTCTGCCAGCAGGGCAATA |
| | | CACTGCCCTGGACTTTTGCCGGAGGCACCAAACTG |
| | | GAGATCAAGGGGGGAGGCGGGAGTGGAGGCGGGGG |
| | | ATCAGGAGGAGGAGGCAGCGGAGGAGGAGGGTCCG |
| | | AGGTCCAGCTGCAGCAGAGCGGACCAGAACTGGTG |
| | | AAGCCCGGAGCAAGTATGAAAATCTCCTGTAAGGC |
| | | CTCAGGATACAGCTTCACCGGCTATACAATGAACT |
| | | GGGTGAAACAGTCCCATGGCAAGAACCTGGAATGG |
| | | ATGGGGCTGATTAATCCTTACAAAGGCGTCAGCAC |
| | | CTATAATCAGAAGTTTAAAGACAAGGCCACACTGA |
| | | CTGTGGATAAGTCTAGTTCAACCGCTTACATGGAG |
| | | CTGCTGTCCCTGACATCTGAAGACAGTGCCGTGTA |
| | | CTATTGTGCTCGGTCTGGCTACTATGGGGACAGTG |
| | | ATTGGTACTTCGATGTCTGGGGACAGGGCACTACC |
| | | CTGACCGTGTTTTCT |
| 32 | Amino Acid | MDIQMTQTTSSLSASLGDRVTISCRASQDIRNYLN |
| | | WYQQKPDGTVKLLIYYTSRLHSGVPSKFSGSGSGT |
| | | DYSLTISNLEQEDIATYFCQQGNTLPWTFAGGTKL |
| | | EIKGGGGSGGGGSGGGGSGGGGSEVQLQQSGPELV |
| | | KPGASMKISCKASGYSFTGYTMNWVKQSHGKNLEW |
| | | MGLINPYKGVSTYNQKFKDKATLTVDKSSSTAYME |
| | | LLSLTSEDSAVYYCARSGYYGDSDWYFDVWGQGTT |
| | | LTVFS |
| 33 | Nucleotide | ATGGCCGACATCGTGCTGACACAGAGCCCCGCCAT |
| | | CATGTCTGCCAGCCCTGGCGAGAAAGTGACCATGA |
| | | CCTGTAGCGCCAGCAGCAGCGTGTCCTACATGAAC |
| | | TGGTATCAGCAGAAGTCCGGCACCAGCCCCAAGCG |
| | | GTGGATCTACGACACAAGCAAGCTGGCCTCTGGCG |
| | | TGCCCGCCCACTTTAGAGGCTCTGGCAGCGGCACA |
| | | AGCTACAGCCTGACCATCAGCGGCATGGAAGCCGA |
| | | GGATGCCGCCACCTACTACTGCCAGCAGTGGTCCA |
| | | GCAACCCCTTCACCTTTGGCTCCGGCACAAAGCTG |
| | | GAAATCAACCGGGCCGACACCGCCCCTACAGGCGG |
| | | CGGAGGATCTGGCGGAGGCGGATCTGGGGGCGGAG |
| | | GAAGTGGGGGGGGAGGATCTATGGCTCAGGTGCAG |
| | | CTGCAGCAGTCTGGCGCCGAACTGGCTAGACCTGG |
| | | CGCCTCCGTGAAGATGAGCTGCAAGGCCAGCGGCT |
| | | ACACCTTCACCCGGTACACCATGCACTGGGTCAAG |
| | | CAGAGGCCTGGACAGGGCCTGGAATGGATCGGCTA |
| | | CATCAACCCCAGCCGGGGCTACACCAACTACAACC |
| | | AGAAGTTCAAGGACAAGGCCACCCTGACCACCGAC |
| | | AAGAGCAGCAGCACCGCCTACATGCAGCTGTCCTC |
| | | CCTGACCAGCGAGGACAGCGCCGTGTACTACTGCG |
| | | CCCGGTACTACGACGACCACTACTCCCTGGACTAC |
| | | TGGGGCCAGGGCACCACACTGACCGTGTCTAGTA |
| 34 | Amino Acid | MADIVLTQSPAIMSASPGEKVTMTCSASSSVSYMN |
| | | WYQQKSGTSPKRWIYDTSKLASGVPAHFRGSGSGT |
| | | SYSLTISGMEAEDAATYYCQQWSSNPFTFGSGTKL |
| | | EINRADTAPTGGGGSGGGGSGGGGSGGGGSMAQVQ |
| | | LQQSGAELARPGASVKMSCKASGYTFTRYTMHWVK |
| | | QRPGQGLEWIGYINPSRGYTNYNQKFKDKATLTTD |
| | | KSSSTAYMQLSSLTSEDSAVYYCARYYDDHYSLDY |
| | | WGQGTTLTVSS |
| 35 | Nucleotide | CAGACCGTGGTGACCCAGGAGCCCAGCCTGACCGT |
| | | GAGCCCCGGCGGCACCGTGACCCTGACCTGCGGCA |
| | | GCAGCACCGGCGCCGTGACCAGCGGCTACTACCCC |
| | | AACTGGGTGCAGCAGAAGCCCGGCCAGGCCCCCAG |
| | | GGGCCTGATCGGCGGCACCAAGTTCCTGGCCCCCG |
| | | GCACCCCCGCCAGGTTCAGCGGCAGCCTGCTGGGC |
| | | GGCAAGGCCGCCCTGACCCTGAGCGGCGTGCAGCC |
| | | CGAGGACGAGGCCGAGTACTACTGCGCCCTGTGGT |
| | | ACAGCAACAGGTGGGTGTTCGGCGGCGGCACCAAG |
| | | CTGACCGTGCTGGGCGGCGGCGGCAGCGGCGGCGG |
| | | CGGCAGCGGCGGCGGCGGCAGCGAGGTGCAGCTGC |
| | | TGGAGAGCGGCGGCGGCCTGGTGCAGCCCGGCGGC |
| | | AGCCTGAAGCTGAGCTGCGCCGCCAGCGGCTTCAC |
| | | CTTCAACATCTACGCCATGAACTGGGTGAGGCAGG |
| | | CCCCCGGCAAGGGCCTGGAGTGGGTGGCCAGGATC |
| | | AGGAGCAAGTACAACAACTACGCCACCTACTACGC |
| | | CGACAGCGTGAAGAGCAGGTTCACCATCAGCAGGG |
| | | ACGACAGCAAGAACACCGCCTACCTGCAGATGAAC |
| | | AACCTGAAGACCGAGGACACCGCCGTGTACTACTG |
| | | CGTGAGGCACGGCAACTTCGGCAACAGCTACGTGA |
| | | GCTTCTTCGCCTACTGGGGCCAGGGCACCCTGGTG |
| | | ACCGTGAGCAGC |
| 36 | Amino Acid | QTVVTQEPSLTVSPGGTVTLTCGSSTGAVTSGYYP |
| | | NWVQQKPGQAPRGLIGGTKFLAPGTPARFSGSLLG |
| | | GKAALTLSGVQPEDEAEYYCALWYSNRWVFGGGTK |
| | | LTVLGGGGSGGGGSGGGGSEVQLLESGGGLVQPGG |
| | | SLKLSCAASGFTFNIYAMNWVRQAPGKGLEWVARI |
| | | RSKYNNYATYYADSVKSRFTISRDDSKNTAYLQMN |
| | | NLKTEDTAVYYCVRHGNFGNSYVSFFAYWGQGTLV |
| | | TVSS |
| 37 | Nucleotide | GACATCCAGCTGACCCAGAGCCCCGCCATCATGAG |
| | | CGCCAGCCCCGGCGAGAAGGTGACCATGACCTGCA |
| | | GGGCCAGCAGCAGCGTGAGCTACATGAACTGGTAC |
| | | CAGCAGAAGAGCGGCACCAGCCCCAAGAGGTGGAT |
| | | CTACGACACCAGCAAGGTGGCCAGCGGCGTGCCCT |
| | | ACAGGTTCAGCGGCAGCGGCAGCGGCACCAGCTAC |
| | | AGCCTGACCATCAGCAGCATGGAGGCCGAGGACGC |
| | | CGCCACCTACTACTGCCAGCAGTGGAGCAGCAACC |
| | | CCCTGACCTTCGGCGCCGGCACCAAGCTGGAGCTG |
| | | AAGGGCGGCGGCGGCAGCGGCGGCGGCGGCAGCGG |
| | | CGGCGGCGGCAGCGACATCAAGCTGCAGCAGAGCG |
| | | GCGCCGAGCTGGCCAGGCCCGGCGCCAGCGTGAAG |
| | | ATGAGCTGCAAGACCAGCGGCTACACCTTCACCAG |
| | | GTACACCATGCACTGGGTGAAGCA |
| | | GAGGCCCGGCCAGGGCCTGGAGTGGATCGGCTACA |
| | | TCAACCCCAGCAGGGGCTACACCAACTACAACCAG |
| | | AAGTTCAAGGACAAGGCCACCCTGACCACCGACAA |
| | | GAGCAGCAGCACCGCCTACATGCAGCTGAGCAGCC |
| | | TGACCAGCGAGGACAGCGCCGTGTACTACTGCGCC |
| | | AGGTACTACGACGACCACTACTGCCTGGACTACTG |
| | | GGGCCAGGGCACCACCCTGACCGTGAGCAGC |
| 38 | Amino Acid | DIQLTQSPAIMSASPGEKVTMTCRASSSVSYMNWY |
| | | QQKSGTSPKRWIYDTSKVASGVPYRFSGSGSGTSY |
| | | SLTISSMEAEDAATYYCQQWSSNPLTFGAGTKLEL |
| | | KGGGGSGGGGSGGGGSDIKLQQSGAELARPGASVK |
| | | MSCKTSGYTFTRYTMHWVKQRPGQGLEWIGYINPS |
| | | RGYTNYNQKFKDKATLTTDKSSSTAYMQLSSLTSE |
| | | DSAVYYCARYYDDHYCLDYWGQGTTLTVSS |
| 39 | Nucleotide | ATGGATATCCAGATGACCCAGTCCCCGAGCTCCCT |
| | | GTCCGCCTCTGTGGGCGATAGGGTCACCATCACCT |
| | | GCCGTGCCAGTCAGGACATCCGTAATTATCTGAAC |
| | | TGGTATCAACAGAAACCAGGAAAAGCTCCGAAACT |
| | | ACTGATTTACTATACCTCCCGCCTGGAGTCTGGAG |
| | | TCCCTTCTCGCTTCTCTGGTTCTGGTTCTGGGACG |
| | | GATTACACTCTGACCATCAGCAGTCTGCAACCGGA |
| | | AGACTTCGCAACTTATTACTGTCAGCAAGGTAATA |
| | | CTCTGCCGTGGACGTTCGGACAGGGCACCAAGGTG |
| | | GAGATCAAAGGCGGCGGCGGAAGTGGAGGAGGAGG |
| | | CTCAGGCGGAGGAGGGAGCGAGGTTCAGCTGGTGG |
| | | AGTCTGGCGGTGGCCTGGTGCAGCCAGGGGGCTCA |
| | | CTCCGTTTGTCCTGTGCAGCTTCTGGCTACTCCTT |
| | | TACCGGCTACACTATGAACTGGGTGCGTCAGGCCC |
| | | CAGGTAAGGGCCTGGAATGGGTTGCACTGATTAAT |
| | | CCTTATAAAGGTGTTAGTACCTACAACCAGAAGTT |
| | | CAAGGACCGTTTCACTATAAGCGTAGATAAATCCA |
| | | AAAACACAGCCTACCTGCAAATGAACAGCCTGCGT |
| | | GCTGAGGACACTGCCGTCTATTATTGTGCTAGAAG |
| | | CGGATACTACGGCGATAGTGACTGGTATTTTGACG |
| | | TGTGGGGTCAAGGAACCCTGGTCACCGTCTCCTCG |
| 40 | Amino Acid | MDIQMTQSPSSLSASVGDRVTITCRASQDIRNYLN |
| | | WYQQKPGKAPKLLIYYTSRLESGVPSRFSGSGSGT |
| | | DYTLTISSLQPEDFATYYCQQGNTLPWTFGQGTKV |
| | | EIKGGGGSGGGGSGGGGSEVQLVESGGGLVQPGGS |
| | | LRLSCAASGYSFTGYTMNWVRQAPGKGLEWVALIN |
| | | PYKGVSTYNQKFKDRFTISVDKSKNTAYLQMNSLR |
| | | AEDTAVYYCARSGYYGDSDWYFDVWGQGTLVTVSS |
| 41 | Nucleotide | ATGGATATCCAGATGACCCAGTCCCCGAGCTCCCT |
| | | GTCCGCCTCTGTGGGCGATAGGGTCACCATCACCT |
| | | GCCGTGCCAGTCAGGACATCCGTAATTATCTGAAC |
| | | TGGTATCAACAGAAACCAGGAAAAGCTCCGAAACT |
| | | ACTGATTTACTATACCTCCCGCCTGGAGTCTGGAG |
| | | TCCCTTCTCGCTTCTCTGGTTCTGGTTCTGGGACG |
| | | GATTACACTCTGACCATCAGCAGTCTGCAACCGGA |
| | | AGACTTCGCAACTTATTACTGTCAGCAAGGTAATA |
| | | CTCTGCCGTGGACGTTCGGACAGGGCACCAAGGTG |
| | | GAGATCAAAGGCGGCGGCGGAAGTGGAGGAGGAGG |
| | | CTCAGGCGGAGGAGGGAGCGAGGTTCAGCTGGTGG |
| | | AGTCTGGCGGTGGCCTGGTGCAGCCAGGGGGCTCA |
| | | CTCCGTTTGTCCTGTGCAGCTTCTGGCTACTCCTT |
| | | TACCGGCTACACTATGAACTGGGTGCGTCAGGCCC |
| | | CAGGTAAGGGCCTGGAATGGGTTGCACTGATTAAT |
| | | CCTACCAAAGGTGTTAGTACCTACAACCAGAAGTT |
| | | CAAGGACCGTTTCACTATAAGCGTAGATAAATCCA |
| | | AAAACACAGCCTACCTGCAAATGAACAGCCTGCGT |
| | | GCTGAGGACACTGCCGTCTATTATTGTGCTAGAAG |
| | | CGGATACTACGGCGATAGTGACTGGTATTTTGACG |
| | | TGTGGGGTCAAGGAACCCTGGTCACCGTCTCCTCG |
| 42 | Amino Acid | MDIQMTQSPSSLSASVGDRVTITCRASQDIRNYLN |
| | | WYQQKPGKAPKLLIYYTSRLESGVPSRFSGSGSGT |
| | | DYTLTISSLQPEDFATYYCQQGNTLPWTFGQGTKV |
| | | EIKGGGGSGGGGSGGGGSEVQLVESGGGLVQPGGS |
| | | LRLSCAASGYSFTGYTMNWVRQAPGKGLEWVALIN |
| | | PTKGVSTYNQKFKDRFTISVDKSKNTAYLQMNSLR |
| | | AEDTAVYYCARSGYYGDSDWYFDVWGQGTLVTVSS |
| 43 | Nucleotide | ATGGACATCCAGATGACTCAGACCACAAGCTCCCT |
| | | GTCTGCAAGTCTGGGCGACCGGGTGACAATCTCCT |
| | | GCAGAGCCTCTCAGGATATTAGGAACTACCTGAAT |
| | | TGGTATCAGCAGAAACCTGATGGCACAGTCAAGCT |
| | | GCTGATCTACTATACCAGCCGGCTGCACTCAGGCG |
| | | TGCCAAGCAAATTCTCAGGAAGCGGCTCCGGGACT |
| | | GACTACTCCCTGACCATCTCTAACCTGGAGCAGGA |
| | | AGATATTGCTACCTATTTCTGCCAGCAGGGCAATA |
| | | CACTGCCCTGGACTTTTGCCGGAGGCACCAAACTG |
| | | GAGATCAAGGGGGGAGGCGGGAGTGGAGGCGGGGG |
| | | ATCAGGAGGAGGAGGCAGCGGAGGAGGAGGGTCCG |
| | | AGGTCCAGCTGCAGCAGAGCGGACCAGAACTGGTG |
| | | AAGCCCGGAGCAAGTATGAAAATCTCCTGTAAGGC |
| | | CTCAGGATACAGCTTCACCGGCTATACAATGAACT |
| | | GGGTGAAACAGTCCCATGGCAAGAACCTGGAATGG |
| | | ATGGGGCTGATTAATCCTACCAAAGGCGTCAGCAC |
| | | CTATAATCAGAAGTTTAAAGACAAGGCCACACTGA |
| | | CTGTGGATAAGTCTAGTTCAACCGCTTACATGGAG |
| | | CTGCTGTCCCTGACATCTGAAGACAGTGCCGTGTA |
| | | CTATTGTGCTCGGTCTGGCTACTATGGGGACAGTG |
| | | ATTGGTACTTCGATGTCTGGGGACAGGGCACTACC |
| | | CTGACCGTGTTTTCT |
| 44 | Amino Acid | MDIQMTQTTSSLSASLGDRVTISCRASQDIRNYLN |
| | | WYQQKPDGTVKLLIYYTSRLHSGVPSKFSGSGSGT |
| | | DYSLTISNLEQEDIATYFCQQGNTLPWTFAGGTKL |
| | | EIKGGGGSGGGGSGGGGSGGGG |
| | | SEVQLQQSGPELVKPGASMKISCKASGYSFTGYTM |
| | | NWVKQSHGKNLEWMGLINPTKGVSTYNQKFKDKAT |
| | | LTVDKSSSTAYMELLSLTSEDSAVYYCARSGYYGD |
| | | SDWYFDVWGQGTTLTVFS |
| 45 | Nucleotide | AGCGGACAGGTGCTGCTGGAATCCAATATCAAAGT |
| | | CCTGCCCACTTGGTCTACCCCCGTGCAGCCTATGG |
| | | CTCTGATTGTGCTGGGAGGAGTCGCAGGACTGCTG |
| | | CTGTTTATCGGGCTGGGAATTTTCTTTTGCGTGCG |
| | | CTGCCGGCACCGGAGAAGGCAGGCCGAGCGCATGA |
| | | GCCAGATCAAGCGACTGCTGAGCGAGAAGAAAACC |
| | | TGTCAGTGTCCCCATAGATTCCAGAAGACCTGTTC |
| | | ACCCATT |
| 46 | Amino Acid | SGQVLLESNIKVLPTWSTPVQPMALIVLGGVAGLL |
| | | LFIGLGIFFCVRCRHRRRQAERMSQIKRLLSEKKT |
| | | CQCPHRFQKTCSPI |
| 47 | Nucleotide | CTCGAGCTGAGGCCCGAGGCTTCTAGACCTGCTGC |
| | | CGGCGGAGCCGTGCACACCAGAGGCCTGGACTTCG |
| | | CCAGCGACATCTACATCTGGGCCCCTCTGGCCGGC |
| | | ACCTGTGGCGTGCTGCTGCTGAGCCTGGTCATCAC |
| | | CCTGTACTGCAACCACCGGAACCGGCGGAGAGTGT |
| | | GCAAGTGCCCCAGACCCGTGGTCAAGAGCGGCGAC |
| | | AAGCCCAGCCTGAGCGCCAGATACGTG |
| 48 | Amino Acid | LELRPEASRPAAGGAVHTRGLDFASDIYIWAPLAG |
| | | TCGVLLLSLVITLYCNHRNRRRVCKCPRPVVKSGD |
| | | KPSLSARYV |
| 49 | Nucleotide | CTCGAGCTGAGGCCCGAGGCTTCTAGACCTGCTGC |
| | | CGGCGGAGCCGTGCACACCAGAGGCCTGGACTTCG |
| | | CCAGCGACATCTACATCTGGGCCCCTCTGGCCGGC |
| | | ACCTGTGGCGTGCTGCTGCTGAGCCTGGTCATCAC |
| | | CCTGTACCTGTGCTGCAGACGGCGGAGAGTGTGCA |
| | | AGTGCCCCAGACCCGTGGTCAAGAGCGGCGACAAG |
| | | CCCAGCCTGAGCGCCAGATACGTG |
| 50 | Amino Acid | LELRPEASRPAAGGAVHTRGLDFASDIYIWAPLAG |
| | | TCGVLLLSLVITLYLCCRRRRVCKCPRPVVKSGDK |
| | | PSLSARYV |
| 51 | Nucleotide | CTCGAGAAGAAGTCCACCCTGAAGAAACGGGTGTC |
| | | CCGGCTGCCCAGACCCGAGACACAGAAGGGCCCCC |
| | | TGAGCAGCCCTATCACCCTGGGACTGCTGGTGGCC |
| | | GGCGTGCTGGTGCTGCTGGTGTCTCTGGGAGTGGC |
| | | CATCCACCTGTGCTGCCGGCGGAGAAGGGCCTGCA |
| | | AGTGCCCCAGACTGCGGTTCATGAAGCAGTTCTAC |
| | | AAG |
| 52 | Amino Acid | LEKKSTLKKRVSRLPRPETQKGPLSSPITLGLLVA |
| | | GVLVLLVSLGVAIHLCCRRRRACKCPRLRFMKQFY |
| | | K |
| 53 | Amino Acid | QVQLVQSGAEVKKPGSSVKVSCKASGGTFSSYAIS |
| | | WVRQAPGQGLEWMGGIIPIFGTANYAQKFQGRVTI |
| | | TADESTSTAYMELSSLRSEDTAVYYCARDILRLSV |
| | | SSGMDVWGQGTLVTVSSGGGSEGGGSEGGGSEGGG |
| | | QSVLTQPPSASGTPGQRVTISCSGGSSNIGSNYVY |
| | | WYQQLPGTAPKLLIYRNNQRPSGVPDRFSGSKSGT |
| | | SASLAISGLRSEDEADYYCAAWDDSLSGHVVFGGG |
| | | TKLTVL |
| 54 | Amino Acid | QVQLVQSGAEVKKPGSSVKVSCKASGGTFSSYAIS |
| | | WVRQAPGQGLEWMGGIIPIFGTANYAQKFQGRVTI |
| | | TADESTSTAYMELSSLRSEDTAVYYCARDILRLSV |
| | | SSGMDVWGQGTLVTVSSGGGSEGGGSEGGGSEGGG |
| | | QSVLTQPPSASGTPGQRVTISCSGSSSNIGSNYVY |
| | | WYQQLPGTAPKLLIYRNNQRPSGVPDRLSGSKSGT |
| | | SASLAISGLRSEDEADYYCAAWDDSLSAVVFGGGT |
| | | KLTVL |
| 55 | Amino Acid | QVQLQESGGGVVQPGRSLRLSCAASGFTLSSYGMH |
| | | WVRQAPGKGLEWVAVISYDGSNKYYADSVKGRFTI |
| | | SRDNSKNTLYLQMNSLRAEDTAVYYCAKSGWRYYY |
| | | YYGMDVWGQGTLVTVSSGGGSEGGGSEGGGSEGGG |
| | | QSVLTQPPSVSGAPGQRVTISCTGSSSNIGAGYDV |
| | | HWYQQLPGTAPKLLIYGNSNRPSGVPDRFSGSKSG |
| | | TSASLAITGLQAEDEADYYCQSYDSSLSGSVFGGG |
| | | TKLTVL |
| 56 | Amino Acid | QVQLVQSGAEVKKPGSSVKVSCKASGGTFSSYAIS |
| | | WVRQAPGQGLEWMGGIIPIFGTANYAQKFQGRVTI |
| | | TADESTSTAYMELSSLRSEDTAVYYCARDILRLSV |
| | | SSGMDVWGQGTMVTVSSGGGSEGGGSEGGGSEGGG |
| | | QSVLTQPPSASGTPGQRVTISCSGSSSNIGSNYVY |
| | | WYQQLPGTAPKLLIYRNNQRPSGVPDRFSGSKSGT |
| | | SASLAISGLRSEDEADYYCAAWDDSLSGPSVVFGG |
| | | GTKLTVL |
| 57 | Amino Acid | QVQLVQSGAEVKKPGASVKVSCKASGYTFTSYGIS |
| | | WVRQAPGQGLEWMGWIGAYNGNTNYAQKLQGRVTM |
| | | TTDTSTSTAYMELRSLRSDDTAVYYCARDLRRYSS |
| | | SWDGPGYWGQGTLVTVSSGGGSEGGGSEGGGSEGG |
| | | GQSALTQPASVSGSPGQSITISCTGTSSDVGGYNY |
| | | VSWYQQHPGKAPKLMIYDVSNRPSGVSNRFSGSKS |
| | | GNTASLTISGLQAEDEADYYCSSYTSSSTRVFGTG |
| | | TKLTVL |
| 58 | Amino Acid | QVQLVQSGAEVKKPGSSVKVSCKASGGTFSSYAIS |
| | | WVRQAPGQGLEWMGGIIPIFGTANYAQKFQGRVTI |
| | | TADESTSTAYMELSSLRSEDTAVYYCARDILRLSV |
| | | SSGMDVWGQGTLVTVSSGGGSEGGGSEGGGSEGGG |
| | | SYVLTQPPSASGTPGQRVTISCSGSSSNIGGNYVY |
| | | WYQQLPGTAPKLLIYRNNQRPSGVPDRFSGSKSGT |
| | | SASLAISGLRSEDEADYYCAAWDDSLSGWVFGGGT |
| | | KLTVL |
| 59 | Amino Acid | QVQLVQSGAEVKKPGSSVKVSCKASGGTFSSYAIS |
| | | WVRQAPGQGLEWMGGIIPIFGTANYAQKFQGRVTI |
| | | TADKSTSTAYMELSSLRSEDTAVYYCARDGGRYSY |
| | | GRSFDYWGQGTLVTVSSGGGSEGGGSEGGGSEGGG |
| | | QSVLTQPPSVSGAPGQRVTISCTGSSSNIGAGYDV |
| | | HWYQQLPGTAPKLLIYGNSNRPSGVPDRFSGSKSG |
| | | TSASLAITGLQAEDEADYYCQSYDSSLSGPVVFGG |
| | | GTKLTVL |
| 60 | Amino Acid | QVQLVQSGAEVKKPGSSVKVSCKASGGTFSSYAIS |
| | | WVRQAPGQGLEWMGGIIPIFGTANYAQKFQGRVTI |
| | | TADESTSTAYMELSSLRSEDTAVYYCARPLRPLHY |
| | | YGMDVWGQGTLVTVSSGGGSE |
| | | GGGSEGGGSEGGGQSVLTQPPSASGTPGQRVTISC |
| | | SGSSSNIGSNYVYWYQQLPGTAPKLLIYRNNQRPS |
| | | GVPDRFSGSKSGTSASLAISGLRSEDEADYYCAAW |
| | | DDSLTEGVFGGGTKLTVL |
| 61 | Amino Acid | QVQLVESGGGVVQPGRSLRLSCAASGFTFSSYGMH |
| | | WVRRAPGKGLEWVAVISYDGSNKYYADSVKGRFTI |
| | | SRDNSKNTLYLQMNSLRAEDTAVYYCAKDGGDSGS |
| | | LDYWGQGTLVTVSSGGGSEGGGSEGGGSEGGGDIV |
| | | MTQSPDSLAVSLGERATINCKSSQSVLYSSNNKNY |
| | | LAWYQQKPGQPPKLLIYWASTRESGVPDRFSGSGS |
| | | GTDFTLTISSLQAEDVAVYYCQQYYSTPLTFGGGT |
| | | KLEIK |
| 62 | Amino Acid | EVQLLESGGGLVQPGGSLRLSCAASGFTFSSYWMS |
| | | WVRQAPGKGLEWVANIKQDGSEKYYVDSVKGRFTI |
| | | SRDNAKNSLYLQMNSLRAEDTAVYYCARPAGQLLY |
| | | GMDVWGQGTLVTVSSGGGSEGGGSEGGGSEGGGSY |
| | | VLTQPPSVSVSPGQTARITCSGDALPKQYAYWYQQ |
| | | KPGQAPVLVIYKDSERPSGIPERFSGSSSGTTVTL |
| | | TISGVQAEDEADYYCQSADSSGTWVFGGGTKLTVL |
| 63 | Amino Acid | EVQLLESGGGVVQPGRSLRLSCAASGFTFSSYGMH |
| | | WVRQAPGKGLEWVAVISYDGSNKYYADSVKGRFTI |
| | | SRDNSKNTLYLQMNSLRAEDTAVYYCAKDAADMGA |
| | | FDYWGQGTLVTVSSGGGSEGGGSEGGGSEGGGDIQ |
| | | MTQSPDSLAVSLGERATMNCKSSQSVLYSSNNKNY |
| | | LAWYQQKPGQPPKLLIYWASARESGVPDRFSGSGS |
| | | GTDFTLTISSLQAEDVAVYYCQQYYSTPLTFGQGT |
| | | KVEIK |
| 64 | Amino Acid | EVQLLESGGGLVKPGGSLRLSCAASGFTFSSYSMN |
| | | WVRQAPGKGLEWVSAISGSGGSTYYADSVKGRFTI |
| | | SRDNSKNTLYLQMNSLRAEDTAVYYCARARGYSYG |
| | | SDAFDIWGQGTMVTVSSGGGSEGGGSEGGGSEGGG |
| | | QSVLTQPPSASGTPGQRVTISCSGSSSNIGSNYVY |
| | | WYQQLPGTAPKLLIYRNNQRPSGVPDRFSGSKSGT |
| | | SASLAISGLRSEDEADYYCAAWDDSLSGVVFGGGT |
| | | KLTVL |
| 65 | Amino Acid | QVQLVQSGGGVVQPGRSLRLSCAASGFTFSSYGMH |
| | | WVRQAPGKGLEWVAVISYDGSNKYYADSVKGRFTI |
| | | SRDNSKNTLYLQMNSLRAEDTAVYYCAKGVPRYYY |
| | | YYGMDVWGQGTMVTVSSGGGSEGGGSEGGGSEGGG |
| | | QSVLTQPPSVSGAPGQRVTISCTGSSSNIGAGYDV |
| | | HWYQQLPGTAPKLLIYGNSNRPSGVPDRFSGSKSG |
| | | TSASLAITGLQAEDEADYYCQSYDSSLSGSVFGGG |
| | | TKLTVL |
| 66 | Amino Acid | EVQLVQSGAEVKKPGSSVKVSCKASGGTFSSYAIS |
| | | WVRQAPGQGLEWMGGIIPIFGTANYAQKFQGRVTI |
| | | TADESTSTAYMELSSLRSEDTAVYYCARDRGRRYC |
| | | SGGSCPNAFDIWGQGTMVTVSSGGGSEGGGSEGGG |
| | | SEGGGEIVLTQSPATLSVSPGERATLSCRASQSVS |
| | | SNLAWYQQKPGQAPRLLIYGASTRATGIPARFSGS |
| | | GSGTEFTLTISSLQSEDFAVYYCQQYNNWPPALTF |
| | | GGGTKVEIK |
| 67 | Amino Acid | QVQLVQSGAEVKKPGSSVKVSCKASGGTFSSYAIS |
| | | WVRQAPGQGLEWMGGIIPIFGTANYAQKFQGRVTI |
| | | TADESTSTAYMELSSLRSEDTAVYYCARGGYVWGS |
| | | YRQNSNWFDPWGQGTLVTVSSGGGSEGGGSEGGGS |
| | | EGGGSYVLTQPPSASGTPGQRVTISCSGSSSNIGS |
| | | NYVYWYQQLPGTAPKLLIYRNNQRPSGVPDRFSGS |
| | | KSGTSASLAISGLRSEDEADYYCAAWDDSLSGWVF |
| | | GGGTKLTVL |
| 68 | Amino Acid | QVQLVESGAEVKKPGSSVKVSCKASGGTFSSYAIS |
| | | WVRQAPGQGLEWMGGIIPIFGTANYAQKFQGRVTI |
| | | TADESTSTAYMELSSLRSEDTAVYYCARDILRLSV |
| | | SSGMDVWGQGTLVTVSSGGGSEGGGSEGGGSEGGG |
| | | QSVLTQPPSASGTPGRRVTISCSGSSSNIGSNYVY |
| | | WYQQLPGTAPKLLIYRNNQRPSGVPDRFSGSKSGT |
| | | SASLAISGLRSEDEADYYCAAWDDSLSGVVFGGGT |
| | | KLTVL |
| 59 | Amino Acid | QVQLVESGGGLVQPGGSLRLSCAASGFTFSSYWMS |
| | | WVRQAPGKGLEWVANIKQDGSEKYYVDSVKGRFTI |
| | | SRDNAKNSLYLQMNSLRAEDTAVYYCARWSHYYDS |
| | | SGLDYWGQGTLVTVSSGGGSEGGGSEGGGSEGGGS |
| | | YVLTQPPSVSVSPGQTARITCSGDALPKQYAYWYQ |
| | | QKPGQAPVLVIYKDSERPSGIPERFSGSSSGTTVT |
| | | LTISGVQAEDEADYYCQSADSSGTWVFGGGTKLTV |
| | | L |
| 70 | Amino Acid | QVQLVESGAEVKKPGSSVKVSCKASGGTFSSYAIS |
| | | WVRQAPGQGLEWMGGIIPIFGTANYAQKFQGRVTI |
| | | TADKSTSTAYMELSSLRSEDTAVYYCARTHLPYSY |
| | | GLGGFDYWGQGTLVTVSSGGGSEGGGSEGGGSEGG |
| | | GQSVLTQPPSVSGAPGQRVTISCTGSSSNIGAGYD |
| | | VHWYQQLPGTAPKLLIYGNSNRPSGVPDRFSGSKS |
| | | GTSASLAITGLQAEDEADYYCQSYDSSLSGPVVFG |
| | | GGTKVTVL |
| 71 | Amino Acid | EVQLVQSGAEVKKPGSSVKVSCKASGGTFSSYAIS |
| | | WVRQAPGQGLEWMGGIIPIFGTANYAQKFQGRVTI |
| | | TADESTSTAYMELSSLRSEDTAVYYCARDPSRDYY |
| | | GSGRFSWFDPWGQGTLVTVSSGGGSEGGGSEGGGS |
| | | EGGGQSVLTQPPSASGTPGQRVTISCSGSSSNIGS |
| | | NYVYWYQQLPGTAPKLLIYRNNQRPSGVPDRFSGS |
| | | KSGTSASLAISGLRSEDEADYYCAAWDDSLSGRGV |
| | | FGGGTKLTVL |
| 72 | Amino Acid | QVQLVQSGAEVKKPGASVKVSCKASGYTFTSYGIS |
| | | WVRQAPGQGLEWMGWISAYNGNTNYAQKLQGRVTM |
| | | TTDTSTSTAYMELRSLRSDDTAVYYCARDIIRYCS |
| | | STSCYRGIDYWGQGTLVTVSSGGGSEGGGSEGGGS |
| | | EGGGQSALTQPASVSGSPGQSITISCTGTSSDVGG |
| | | YNYVSWYQQHPGKAPKLMIYDVSNRPSGVSNRFSG |
| | | SKSGNTASLTISGLQAEDEADYYCSSYTSSSPHVV |
| | | SGGGTKLTVL |
| 73 | Amino Acid | QVQLVESGGGVVQPGRSLRLSCAASGFTFSSYGMH |
| | | WVRQAPGKGLEWVAVISYDGSNKYYADSVKGRFTI |
| | | SRDNSKNTLYLQMNSLRAEDTAVYYCARDGTDYRG |
| | | AFDIWGQGTMVTVSSGGGSEGGGSEGGGSEGGGDI |
| | | QLTQSPDSLAVPLGERATINCKSSQSVLYSSNNKN |
| | | YLAWYQQKPGQPPKLLIYWASTRESGVPDRFSGSG |
| | | SGTDFTLTISSLQAEDVAVYYCQQYYSTPLTFGQG |
| | | TKLEIK |
| 74 | Amino Acid | EVQLVQSGAEVKKPGSSVRVSCKASGGTFSSYAIS |
| | | WVRQAPGQGLEWMGGIIPIFGTANYAQKFQGRVTI |
| | | TADKSTSTAYMELSSLRSEDTAVYYCARGGGRWLH |
| | | SRLDVWGQGTTVTVSSGGGSEGGGSEGGGSEGGGQ |
| | | SVLTQPPSVSGAPGQRVTISCTGSSSNIGAGYDVH |
| | | WYQQFPGTAPKLLIFGNNNRPSGVPDRFSGSKSGT |
| | | SASLAITGLQAEDEANYYCQSYDRSLSGPVVFGGG |
| | | TKLTVL |
| 75 | Amino Acid | EVQLVESGGGVVQPGRSLRLSCAASGFTFSSYGMH |
| | | WVRQAPGKGLEWVAVISYDGSNKYYADSVKGRFTI |
| | | SRDNSKNTLYLQMNSLRAEDTAVYYCAKDAGDLGA |
| | | FDIWGQGTMVTVSSGGGSEGGGSEGGGSEGGGDIV |
| | | MTQSPDSLAVSLGERATINCKSSQSVLYSSNNKNY |
| | | LAWYQQKPGQPPKLLIYWASTRESGVPDRFSGSGS |
| | | GTDFTLTISSLQAEDVAVYYCQQYYSTPLTFGPGT |
| | | KVEIK |
| 76 | Amino Acid | QVQLVQSGGGVVQPGRSLRLSCAASGFTFSSYAMH |
| | | WVRQAPGKGLEWVAVISYDGSNKYYADSVKGRFTI |
| | | SRDNSKNTLYLQMNSLRAEDTAVYYCARGRVYYYD |
| | | SSGYSYWGQGTLVTVSSGGGSEGGGSEGGGSEGGG |
| | | QSVLTQPPSVSGAPGQRVTISCTGSSSNIGAGYDV |
| | | HWYQQLPGTAPKLLIYGNSNRPSGVPDRFSGSKSG |
| | | TSASLAITGLQAEDEADYYCQSYDSSLSGREVFGT |
| | | GTKLTVL |
| 77 | Amino Acid | QVQLVESGAEVKKPGSSVKVSCKASGGTFSSYAIS |
| | | WVRQAPGQGLEWMGGIIPIFGTANYAQKFQGRVTI |
| | | TADESTSTAYMELSSLRSEDTAVYYCARPLYAPRF |
| | | GYGMDVWGQGTLVTVSSGGGSEGGGSEGGGSEGGG |
| | | QSVLTQPPSASGTPGQRVTISCSGSSSNIGSNYVY |
| | | WYQQLPGTAPKLLIYRNNQRPSGVPDRFSGSKSGT |
| | | SASLAISGLRSEDEADYYCAAWDDSLSGWVFGGGT |
| | | QLTVL |
| 78 | Amino Acid | EVQLLESGGGLVQPGGSLRLSCAASGFTFSSYAMS |
| | | WVRQAPGKGLEWVSAISGSGGSTYYADSVKGRFTI |
| | | SRDNSKNTLYLQMNSLRAEDTAVYYCAKDRGGQRG |
| | | FDYWGQGTLVTVSSGGGSEGGGSEGGGSEGGGQSV |
| | | LTQPPSASGTPGQRVTISCSGSSSNIGSNYVYWYQ |
| | | QLPGTAPKLLIYRNNQRPSGVPDRFSGSKSGTSAS |
| | | LAISGLRSEDEADYYCAAWDDSLSGLVFGGGTKLT |
| | | VL |
| 79 | Amino Acid | QVQLVQSGAEVKKPGSSVKVSCKASGGTFSSYAIS |
| | | WVRQAPGQGLEWMGGIIPIFGTANYAQKFQGRVTI |
| | | TADESTSTAYMELSSLRSEDTAVYYCARDILRLSV |
| | | SSGMDVWGQGTLVTVSSGSTSGSGKPGSGEGSTKG |
| | | QSVLTQPPSASGTPGQRVTISCSGGSSNIGSNYVY |
| | | WYQQLPGTAPKLLIYRNNQRPSGVPDRFSGSKSGT |
| | | SASLAISGLRSEDEADYYCAAWDDSLSGHVVFGGG |
| | | TKLTVL |
| 80 | Amino Acid | QVQLVQSGAEVKKPGSSVKVSCKASGGTFSSYAIS |
| | | WVRQAPGQGLEWMGGIIPIFGTANYAQKFQGRVTI |
| | | TADESTSTAYMELSSLRSEDTAVYYCARDILRLSV |
| | | SSGMDVWGQGTLVTVSSGSTSGSGKPGSGEGSTKG |
| | | QSVLTQPPSASGTPGQRVTISCSGSSSNIGSNYVY |
| | | WYQQLPGTAPKLLIYRNNQRPSGVPDRLSGSKSGT |
| | | SASLAISGLRSEDEADYYCAAWDDSLSAVVFGGGT |
| | | KLTVL |
| 81 | Amino Acid | QVQLQESGGGVVQPGRSLRLSCAASGFTLSSYGMH |
| | | WVRQAPGKGLEWVAVISYDGSNKYYADSVKGRFTI |
| | | SRDNSKNTLYLQMNSLRAEDTAVYYCAKSGWRYYY |
| | | YYGMDVWGQGTLVTVSSGSTSGSGKPGSGEGSTKG |
| | | QSVLTQPPSVSGAPGQRVTISCTGSSSNIGAGYDV |
| | | HWYQQLPGTAPKLLIYGNSNRPSGVPDRFSGSKSG |
| | | TSASLAITGLQAEDEADYYCQSYDSSLSGSVFGGG |
| | | TKLTVL |
| 82 | Amino Acid | QVQLVQSGAEVKKPGSSVKVSCKASGGTFSSYAIS |
| | | WVRQAPGQGLEWMGGIIPIFGTANYAQKFQGRVTI |
| | | TADESTSTAYMELSSLRSEDTAVYYCARDILRLSV |
| | | SSGMDVWGQGTMVTVSSGSTSGSGKPGSGEGSTKG |
| | | QSVLTQPPSASGTPGQRVTISCSGSSSNIGSNYVY |
| | | WYQQLPGTAPKLLIYRNNQRPSGVPDRFSGSKSGT |
| | | SASLAISGLRSEDEADYYCAAWDDSLSGPSVVFGG |
| | | GTKLTVL |
| 83 | Amino Acid | QVQLVQSGAEVKKPGASVKVSCKASGYTFTSYGIS |
| | | WVRQAPGQGLEWMGWIGAYNGNTNYAQKLQGRVTM |
| | | TTDTSTSTAYMELRSLRSDDTAVYYCARDLRRYSS |
| | | SWDGPGYWGQGTLVTVSSGSTSGSGKPGSGEGSTK |
| | | GQSALTQPASVSGSPGQSITISCTGTSSDVGGYNY |
| | | VSWYQQHPGKAPKLMIYDVSNRPSGVSNRFSGSKS |
| | | GNTASLTISGLQAEDEADYYCSSYTSSSTRVFGTG |
| | | TKLTVL |
| 84 | Amino Acid | QVQLVQSGAEVKKPGSSVKVSCKASGGTFSSYAIS |
| | | WVRQAPGQGLEWMGGIIPIFGTANYAQKFQGRVTI |
| | | TADESTSTAYMELSSLRSEDTAVYYCARDILRLSV |
| | | SSGMDVWGQGTLVTVSSGSTSGSGKPGSGEGSTKG |
| | | SYVLTQPPSASGTPGQRVTISCSGSSSNIGGNYVY |
| | | WYQQLPGTAPKLLIYRNNQRPSGVPDRFSGSKSGT |
| | | SASLAISGLRSEDEADYYCAAWDDSLSGWVFGGGT |
| | | KLTVL |
| 85 | Amino Acid | QVQLVQSGAEVKKPGSSVKVSCKASGGTFSSYAIS |
| | | WVRQAPGQGLEWMGGIIPIFGTANYAQKFQGRVTI |
| | | TADKSTSTAYMELSSLRSEDTAVYYCARDGGRYSY |
| | | GRSFDYWGQGTLVTVSSGSTSGSGKPGSGEGSTKG |
| | | QSVLTQPPSVSGAPGQRVTISCTGSSSNIGAGYDV |
| | | HWYQQLPGTAPKLLIYGNSNRPSGVPDRFSGSKSG |
| | | TSASLAITGLQAEDEADYYCQSYDSSLSGPVVFGG |
| | | GTKLTVL |
| 86 | Amino Acid | QVQLVQSGAEVKKPGSSVKVSCKASGGTFSSYAIS |
| | | WVRQAPGQGLEWMGGIIPIFGTANYAQKFQGRVTI |
| | | TADESTSTAYMELSSLRSEDTAVYYCARPLRPLHY |
| | | YGMDVWGQGTLVTVSSGSTSGSGKPGSGEGSTKGQ |
| | | SVLTQPPSASGTPGQRVTISCSGSSSNIGSNYVYW |
| | | YQQLPGTAPKLLIYRNNQRPSGVPDRFSGSKSGTS |
| | | ASLAISGLRSEDEADYYCAAWDDSLTEGVFGGGTK |
| | | LTVL |
| 87 | Amino Acid | QVQLVESGGGVVQPGRSLRLSCAASGFTFSSYGMH |
| | | WVRRAPGKGLEWVAVISYDGSNKYYADSVKGRFTI |
| | | SRDNSKNTLYLQMNSLRAEDTAVYYCAKDGGDSGS |
| | | LDYWGQGTLVTVSSGSTSGSGKPGSGEGSTKGDIV |
| | | MTQSPDSLAVSLGERATINCKSSQSVLYSSNNKNY |
| | | LAWYQQKPGQPPKLLIYWASTRESGVPDRFSGSGS |
| | | GTDFTLTISSLQAEDVAVYYCQQYYSTPLTFGGGT |
| | | KLEIK |
| 88 | Amino Acid | EVQLLESGGGLVQPGGSLRLSCAASGFTFSSYWMS |
| | | WVRQAPGKGLEWVANIKQDGSEKYYVDSVKGRFTI |
| | | SRDNAKNSLYLQMNSLRAEDTAVYYCARPAGQLLY |
| | | GMDVWGQGTLVTVSSGS |
| | | TSGSGKPGSGEGSTKGSYVLTQPPSVSVSPGQTAR |
| | | ITCSGDALPKQYAYWYQQKPGQAPVLVIYKDSERP |
| | | SGIPERFSGSSSGTTVTLTISGVQAEDEADYYCQS |
| | | ADSSGTWVFGGGTKLTVL |
| 89 | Amino Acid | EVQLLESGGGVVQPGRSLRLSCAASGFTFSSYGMH |
| | | WVRQAPGKGLEWVAVISYDGSNKYYADSVKGRFTI |
| | | SRDNSKNTLYLQMNSLRAEDTAVYYCAKDAADMGA |
| | | FDYWGQGTLVTVSSGSTSGSGKPGSGEGSTKGDIQ |
| | | MTQSPDSLAVSLGERATMNCKSSQSVLYSSNNKNY |
| | | LAWYQQKPGQPPKLLIYWASARESGVPDRFSGSGS |
| | | GTDFTLTISSLQAEDVAVYYCQQYYSTPLTFGQGT |
| | | KVEIK |
| 90 | Amino Acid | EVQLLESGGGLVKPGGSLRLSCAASGFTFSSYSMN |
| | | WVRQAPGKGLEWVSAISGSGGSTYYADSVKGRFTI |
| | | SRDNSKNTLYLQMNSLRAEDTAVYYCARARGYSYG |
| | | SDAFDIWGQGTMVTVSSGSTSGSGKPGSGEGSTKG |
| | | QSVLTQPPSASGTPGQRVTISCSGSSSNIGSNYVY |
| | | WYQQLPGTAPKLLIYRNNQRPSGVPDRFSGSKSGT |
| | | SASLAISGLRSEDEADYYCAAWDDSLSGVVFGGGT |
| | | KLTVL |
| 91 | Amino Acid | QVQLVQSGGGVVQPGRSLRLSCAASGFTFSSYGMH |
| | | WVRQAPGKGLEWVAVISYDGSNKYYADSVKGRFTI |
| | | SRDNSKNTLYLQMNSLRAEDTAVYYCAKGVPRYYY |
| | | YYGMDVWGQGTMVTVSSGSTSGSGKPGSGEGSTKG |
| | | QSVLTQPPSVSGAPGQRVTISCTGSSSNIGAGYDV |
| | | HWYQQLPGTAPKLLIYGNSNRPSGVPDRFSGSKSG |
| | | TSASLAITGLQAEDEADYYCQSYDSSLSGSVFGGG |
| | | TKLTVL |
| 92 | Amino Acid | EVQLVQSGAEVKKPGSSVKVSCKASGGTFSSYAIS |
| | | WVRQAPGQGLEWMGGIIPIFGTANYAQKFQGRVTI |
| | | TADESTSTAYMELSSLRSEDTAVYYCARDRGRRYC |
| | | SGGSCPNAFDIWGQGTMVTVSSGSTSGSGKPGSGE |
| | | GSTKGEIVLTQSPATLSVSPGERATLSCRASQSVS |
| | | SNLAWYQQKPGQAPRLLIYGASTRATGIPARFSGS |
| | | GSGTEFTLTISSLQSEDFAVYYCQQYNNWPPALTF |
| | | GGGTKVEIK |
| 93 | Amino Acid | QVQLVQSGAEVKKPGSSVKVSCKASGGTFSSYAIS |
| | | WVRQAPGQGLEWMGGIIPIFGTANYAQKFQGRVTI |
| | | TADESTSTAYMELSSLRSEDTAVYYCARGGYVWGS |
| | | YRQNSNWFDPWGQGTLVTVSSGSTSGSGKPGSGEG |
| | | STKGSYVLTQPPSASGTPGQRVTISCSGSSSNIGS |
| | | NYVYWYQQLPGTAPKLLIYRNNQRPSGVPDRFSGS |
| | | KSGTSASLAISGLRSEDEADYYCAAWDDSLSGWVF |
| | | GGGTKLTVL |
| 94 | Amino Acid | QVQLVESGAEVKKPGSSVKVSCKASGGTFSSYAIS |
| | | WVRQAPGQGLEWMGGIIPIFGTANYAQKFQGRVTI |
| | | TADESTSTAYMELSSLRSEDTAVYYCARDILRLSV |
| | | SSGMDVWGQGTLVTVSSGSTSGSGKPGSGEGSTKG |
| | | QSVLTQPPSASGTPGRRVTISCSGSSSNIGSNYVY |
| | | WYQQLPGTAPKLLIYRNNQRPSGVPDRFSGSKSGT |
| | | SASLAISGLRSEDEADYYCAAWDDSLSGVVFGGGT |
| | | KLTVL |
| 95 | Amino Acid | QVQLVESGGGLVQPGGSLRLSCAASGFTFSSYWMS |
| | | WVRQAPGKGLEWVANIKQDGSEKYYVDSVKGRFTI |
| | | SRDNAKNSLYLQMNSLRAEDTAVYYCARWSHYYDS |
| | | SGLDYWGQGTLVTVSSGSTSGSGKPGSGEGSTKGS |
| | | YVLTQPPSVSVSPGQTARITCSGDALPKQYAYWYQ |
| | | QKPGQAPVLVIYKDSERPSGIPERFSGSSSGTTVT |
| | | LTISGVQAEDEADYYCQSADSSGTWVFGGGTKLTV |
| | | L |
| 96 | Amino Acid | QVQLVESGAEVKKPGSSVKVSCKASGGTFSSYAIS |
| | | WVRQAPGQGLEWMGGIIPIFGTANYAQKFQGRVTI |
| | | TADKSTSTAYMELSSLRSEDTAVYYCARTHLPYSY |
| | | GLGGFDYWGQGTLVTVSSGSTSGSGKPGSGEGSTK |
| | | GQSVLTQPPSVSGAPGQRVTISCTGSSSNIGAGYD |
| | | VHWYQQLPGTAPKLLIYGNSNRPSGVPDRFSGSKS |
| | | GTSASLAITGLQAEDEADYYCQSYDSSLSGPVVFG |
| | | GGTKVTVL |
| 97 | Amino Acid | EVQLVQSGAEVKKPGSSVKVSCKASGGTFSSYAIS |
| | | WVRQAPGQGLEWMGGIIPIFGTANYAQKFQGRVTI |
| | | TADESTSTAYMELSSLRSEDTAVYYCARDPSRDYY |
| | | GSGRFSWFDPWGQGTLVTVSSGSTSGSGKPGSGEG |
| | | STKGQSVLTQPPSASGTPGQRVTISCSGSSSNIGS |
| | | NYVYWYQQLPGTAPKLLIYRNNQRPSGVPDRFSGS |
| | | KSGTSASLAISGLRSEDEADYYCAAWDDSLSGRGV |
| | | FGGGTKLTVL |
| 98 | Amino Acid | QVQLVQSGAEVKKPGASVKVSCKASGYTFTSYGIS |
| | | WVRQAPGQGLEWMGWISAYNGNTNYAQKLQGRVTM |
| | | TTDTSTSTAYMELRSLRSDDTAVYYCARDIIRYCS |
| | | STSCYRGIDYWGQGTLVTVSSGSTSGSGKPGSGEG |
| | | STKGQSALTQPASVSGSPGQSITISCTGTSSDVGG |
| | | YNYVSWYQQHPGKAPKLMIYDVSNRPSGVSNRFSG |
| | | SKSGNTASLTISGLQAEDEADYYCSSYTSSSPHVV |
| | | SGGGTKLTVL |
| 99 | Amino Acid | QVQLVESGGGVVQPGRSLRLSCAASGFTFSSYGMH |
| | | WVRQAPGKGLEWVAVISYDGSNKYYADSVKGRFTI |
| | | SRDNSKNTLYLQMNSLRAEDTAVYYCARDGTDYRG |
| | | AFDIWGQGTMVTVSSGSTSGSGKPGSGEGSTKGDI |
| | | QLTQSPDSLAVPLGERATINCKSSQSVLYSSNNKN |
| | | YLAWYQQKPGQPPKLLIYWASTRESGVPDRFSGSG |
| | | SGTDFTLTISSLQAEDVAVYYCQQYYSTPLTFGQG |
| | | TKLEIK |
| 100 | Amino Acid | EVQLVQSGAEVKKPGSSVRVSCKASGGTFSSYAIS |
| | | WVRQAPGQGLEWMGGIIPIFGTANYAQKFQGRVTI |
| | | TADKSTSTAYMELSSLRSEDTAVYYCARGGGRWLH |
| | | SRLDVWGQGTTVTVSSGSTSGSGKPGSGEGSTKGQ |
| | | SVLTQPPSVSGAPGQRVTISCTGSSSNIGAGYDVH |
| | | WYQQFPGTAPKLLIFGNNNRPSGVPDRFSGSKSGT |
| | | SASLAITGLQAEDEANYYCQSYDRSLSGPVVFGGG |
| | | TKLTVL |
| 101 | Amino Acid | EVQLVESGGGVVQPGRSLRLSCAASGFTFSSYGMH |
| | | WVRQAPGKGLEWVAVISYDGSNKYYADSVKGRFTI |
| | | SRDNSKNTLYLQMNSLRAEDTAVYYCAKDAGDLGA |
| | | FDIWGQGTMVTVSSGSTSGSGKPGSGEGSTKGDIV |
| | | MTQSPDSLAVSLGERATINCKSSQSVLYSSNNKNY |
| | | LAWYQQKPGQPPKLLIYWASTRESGVPDRFSGSGS |
| | | GTDFTLTISSLQAEDVAVYYCQQYYSTPLTFGPGT |
| | | KVEIK |
| 102 | Amino Acid | QVQLVQSGGGVVQPGRSLRLSCAASGFTFSSYAMH |
| | | WVRQAPGKGLEWVAVISYDGSNKYYADSVKGRFTI |
| | | SRDNSKNTLYLQMNSLRAEDTAVYYCARGRVYYYD |
| | | SSGYSYWGQGTLVTVSSGSTSGSGKPGSGEGSTKG |
| | | QSVLTQPPSVSGAPGQRVTISCTGSSSNIGAGYDV |
| | | HWYQQLPGTAPKLLIYGNSNRPSGVPDRFSGSKSG |
| | | TSASLAITGLQAEDEADYYCQSYDSSLSGREVFGT |
| | | GTKLTVL |
| 103 | Amino Acid | QVQLVESGAEVKKPGSSVKVSCKASGGTFSSYAIS |
| | | WVRQAPGQGLEWMGGIIPIFGTANYAQKFQGRVTI |
| | | TADESTSTAYMELSSLRSEDTAVYYCARPLYAPRF |
| | | GYGMDVWGQGTLVTVSSGSTSGSGKPGSGEGSTKG |
| | | QSVLTQPPSASGTPGQRVTISCSGSSSNIGSNYVY |
| | | WYQQLPGTAPKLLIYRNNQRPSGVPDRFSGSKSGT |
| | | SASLAISGLRSEDEADYYCAAWDDSLSGWVFGGGT |
| | | QLTVL |
| 104 | Amino Acid | EVQLLESGGGLVQPGGSLRLSCAASGFTFSSYAMS |
| | | WVRQAPGKGLEWVSAISGSGGSTYYADSVKGRFTI |
| | | SRDNSKNTLYLQMNSLRAEDTAVYYCAKDRGGQRG |
| | | FDYWGQGTLVTVSSGSTSGSGKPGSGEGSTKGQSV |
| | | LTQPPSASGTPGQRVTISCSGSSSNIGSNYVYWYQ |
| | | QLPGTAPKLLIYRNNQRPSGVPDRFSGSKSGTSAS |
| | | LAISGLRSEDEADYYCAAWDDSLSGLVFGGGTKLT |
| | | VL |
| 105 | Amino Acid | EVKLVESGGGLVQPGGSLKLSCTTSGFTFSSYGLS |
| | | WIRQTPDKRLELVASINRNGDNTYYTDSVKGRFTI |
| | | SRHDAKNTLNLQMNSLKSEDTAMYYCTRGGFSYWG |
| | | QGTLVTVSAGSTSGSGKPGSGEGSTKGDIVLTQSP |
| | | AIMSSSPGEKVTMTCSASSSVSYMYWYQQRPGSSP |
| | | RLLIYDTSKLASGVPVRFSGSVSGTSYSLTISRME |
| | | SEDAATYYCQQWSGFPPITFGAGTKLELK |
| 106 | Amino Acid | EVKLVESGGGLVQPGGSLKLSCTTSGFTFSSYGLS |
| | | WIRQTPDKRLELVASINRNGDNTYYTDSVRGRFTI |
| | | SRDNAKNTLNLQMSSLKSEDTAMYYCTRGGFSYWG |
| | | QGTLVTVSAGSTSGSGKPGSGEGSTKGDIVLTQSP |
| | | ATMSASPGEKVTLTCSASPGVTYMYWYQQKPGSSP |
| | | RLLIYDTSNLASGVPLRFSGSGSGTSYSLTISRTE |
| | | AEDAATYYCQQWSGYPPITFGAGTKLELR |
| 107 | Amino Acid | EVKLVESGGGLVQPGGSLKLSCTTSGFTFSSYGLS |
| | | WIRQTPDKRLELVASINRNGDNAYYIDSVKGRFTI |
| | | SRDNAKNALNLQMSSLKSEDTAMYYCTRGGFSHWG |
| | | QGTLVTVAAGSTSGSGKPGSGEGSTKGQIVLTQSP |
| | | AIMSASPGEKVTMTCSASSSVSYMYWYQQKPGSSP |
| | | RLLIYDTSNLASGVPVRFSGSGSGTSYSLIISRME |
| | | AEDAATYYCQQWSGYPPITFGAGTKLELK |
| 108 | Amino Acid | EVKLVESGGGLVQPGGSLKLSCAASGFTFSSYGLS |
| | | WVRQTPDKGLELVASINRNGGNTYYTDSVKGRFTI |
| | | SRDNAKNTLNLQMSSLKSEDTAMYYCARGGFTYWG |
| | | QGTLVTVSAGSTSGSGKPGSGEGSTKGQIVLTQSP |
| | | AIMSAFPGEKVTMTCSASSSVGYMYWYQQKPGSSP |
| | | RLLIYDTSNLASGVPVRFSGSGSGTAYSLTISRME |
| | | AEDAATYYCQQWSGYPPITFGAGTKLELK |
| 109 | Amino Acid | QVQLKESGGGLVRPGGSLKLSCAASGFTFSNYGMS |
| | | WIRQTPDKNLELVASINTSGGNTYYPDSVKGRFTI |
| | | SRDNARATLNLQMSNLKSEDTAIYYCTRGGFTHWG |
| | | QGTLVAVSAGSTSGSGKPGSGEGSTKGQIVLTQSP |
| | | AIMSASPGEKVTMTCSASSSVSYMYWYQQKPGSSP |
| | | RLLIYDTSNLASGVPVRFSGSGSGTSYFLTISRME |
| | | AEDAATYYCQQWTGYPPITFGAGTKLELR |
| 110 | Amino Acid | QVQLKESGGGLVQPGGSLKLSCAASGFPFSSYGLS |
| | | WVRQTPDKRLELVATINRNGDSAYYPDSVKGRFTI |
| | | SRDDAKNTLYLQMSSLKSEDTAMYYCTRGGFAYWG |
| | | QGTLVTVSAGSTSGSGKPGSGEGSTKGQIVLTQSP |
| | | AIMSASPGEKVTMTCSGSSSVGYMYWYQQKPGFSP |
| | | RLLIYDTSNLASGVPVRFSGSGSGTSYSLTISRME |
| | | AEDAATYYCQQWSGYPPITFGAGTKLELK |
| 111 | Amino Acid | EVKLVESGGGLVRPGGSLKLSCAASGFTFSNYGMS |
| | | WIRQTPDKNLELVASINTSGGNTYYPDSVKGRFTI |
| | | SRDNARATLNLQMSNLKSEDTAIYYCTRGGFTHWG |
| | | QGTLVTVSAGSTSGSGKPGSGEGSTKGDIVLTQSP |
| | | AIMSASPGEKVTMTCSASSSVAFMYWYQQKPGSSP |
| | | RLLIYDTSKLASGVPVRFSGSGSGTSYSLTISRME |
| | | AEDAATYYCQQWSGYPPITFGAGTKLELK |
| 112 | Amino Acid | QVQLKESGGGLVQPGGSLKLSCTTSGFTFSSYGLS |
| | | WIRQTPDKRLELVASINRNGDNTYYTDSVRGRFTI |
| | | SRDNAKSTLNLQMSSLKSEDTAMYYCTRGGFSYWG |
| | | QGTLVTVSAGSTSGSGKPGSGEGSTKGQIVLTQSP |
| | | PLMSASPGEKVTMTCSASSSVGYMYWFQQRPGSSP |
| | | RLLIYDTYNLASGVPVRFSGSGSGTSYSLTISRLE |
| | | AEDAATYYCQQWSGYPPITFGAGTKLELR |
| 113 | Amino Acid | EVKLVESGGGLVQPGGSLKLSCAASGFTFSSYGLS |
| | | WVRQTPDKRLELVASVNRNGGNTYYTDSVKGRFTI |
| | | SRDNAKNTLNLQMSSLKSEDTAMYYCARGGFTYWG |
| | | QGTLVTVSAGSTSGSGKPGSGEGSTKGQIVLTQSP |
| | | AIMSASPGEKVTMTCSASSSVGYMYWYQQKPGSSP |
| | | RLLIYDTSHLASGVPVRFSGSGSGTSYSLTISRME |
| | | AEDAATYYCQQWSGYPPITFGAGTKLELK |
| 114 | Amino Acid | EVKLVESGGGLVQPGGSLKLSCAASGFPFSSYGLS |
| | | WVRQTPDKRLELVATINRNGDSAYYPDSVKGRFTI |
| | | SRDDAKNTLYLQMSSLKSEDTAMYYCTRGGFAYWG |
| | | QGTLVTVSAGSTSGSGKPGSGEGSTKGQIVLTQSP |
| | | VIMSASPGEKVTMTCSASSSVGYMYWYQQRPGSSP |
| | | RLLIYDTSNLASGAPVRFSGSGSGTSYSLTISRME |
| | | AEDAATYYCQQWSGYPPITFGAGTKLELK |
| 115 | Amino Acid | EVKLVESGGGLVQPGGSLKLSCTTSGFTFSSYGLS |
| | | WIRQTPDKRLELVASINRNGDNTYYTDSVKGRFTI |
| | | SRDNAKNTLNLQMSSLKSEDTAMYYCTRGGFSYWG |
| | | QGTLVTVSAGSTSGSGKPGSGEGSTKGQIVLTQSP |
| | | AIMSASPGEKVTMTCSASSSVSYMYWYQQKPGSSP |
| | | RLLIYDTSNLASGVPVRFSGSGSGTSYSLTISRME |
| | | AEDAATYYCQQWTGYPPITFGAGTKLELK |
| 116 | Amino Acid | EVKLVESGGVLVQPGGSLKLSCAASGFTFSSYGMS |
| | | WVRQTPDKRLELVASINKNGGSTYYPDSVKGRFTI |
| | | SRDNAKTTVYLQMSSLKSEDTAMYYCTRGGFAYWG |
| | | QGTLVTVSAGSTSGSGKPGSGEGSTKGQIVLTQSP |
| | | AIMSASPGEKVTLTCSASSSVGYMYWYQQRPGSSP |
| | | RLLIYDTSNLPSGVPVRFSGSGSGTSYSLTISRME |
| | | AEDAATYYCQQWSGYPPITFGAGTKLELK |
| 117 | Amino Acid | QLQLQESGGGLVQAGGSLRLSCAASGRTGSSYAMG |
| | | WFRQAPGKEREFVAAITWSGGITAYADSVKGRFTI |
| | | SRDNAKNTVYLQMNSLKPEDTAVYCCAAGVTGSPS |
| | | FDSWGQGTQVTVSS |
| 118 | Amino Acid | QVQLQESGGGLVQAGGSLRLSCAASGRTFSSYAMG |
| | | WFRQAPGKEREFVAAISGSGGSIYYGDSVKGRFTI |
| | | SRDNAKNTMYLQMNRLKPEDTAVYYCAAGPLGSPD |
| | | FDSWGQGTQVTVSS |
| 119 | Amino Acid | EVQVVESGGGLVQPGGSLRLSCVASGRTFSSYAMG |
| | | WFRQAPGKEREFVAAISGSGGSIYYGDSVKGRFTI |
| | | SRDNAKNTMYLQMNRLKPEDTAVYYCAAGPLGSPD |
| | | FDSWGQGTQVTVSS |
| 120 | Amino Acid | KVQLVESGGGLVQAGGSLRLSCAASGRTGSSYAMG |
| | | WFRQAPGKEREFVAAITWSGGITAYADSVKGRFTI |
| | | SRDNAKNTVYLQMNSLKPEDTAVYCCAAGVTGSPS |
| | | FDSWGQGTQVTVSS |
| 121 | Amino Acid | EVQLVESGGGLVQAGGSLRLSCAASGRTFSSYAMG |
| | | WFRQAPGKEREFVAAISGSGGVTFYAHSVKGRFTI |
| | | SRDNAKNTVYLQMNSLKPEDTAVYSCAGGAHGSPD |
| | | FGSWGQGTQVTVSS |
| 122 | Amino Acid | QVQLVESGGGLVQPGGSLRLSCAVSRNIASLYRVD |
| | | WYRQAPGKQRELVAGRTSGGTTTYLDAVEGRFTIS |
| | | RDNVKDTVYLQMNSLTPEDTAVYYCHAHDHWRDSW |
| | | GQGTQVTVSS |
| 123 | Amino Acid | QVQLVESGGDLVQPGGSLRLSCAASGSIGSIYAMG |
| | | WYRQAPGRQRELVATTTSGGTTNYADSVKGRFTIA |
| | | GDNAKNTVFLQMNSLRPEDTAVYYCKIQTHWYVYW |
| | | GQGTQVTVSS |
| 124 | Amino Acid | EVQLVESGGGLVQPGGSLRLSCAASRNIFSLYRVD |
| | | WYRQAPGKQRELVAGSTSGGTTTYADAVKGRFTIS |
| | | TDNVKDTVYLQMNSLTPEDTAVYYCHAHDHWRDSW |
| | | GQGTQVTVSS |
| 125 | Amino Acid | QVQLVESGGGWVHPGGSLRLSCAASRNIFSMYRVD |
| | | WYRQAPGKQRELVAGITSGGTTSYADAVKGRFTIS |
| | | TDNVKDTVYLQMNSVTPEDTAVYYCHAHDHWRDSW |
| | | GQGTQVTVSS |
| 126 | Amino Acid | EVQVQESGGDLVQPGGSLRLSCAASGSIGSIYRKG |
| | | WYRQAPGSQRELVATITSAGTTNYADSVKGRFTIS |
| | | RDNAKNTVYLQMNSLRPEDTAVYYCNFQTHWYVYW |
| | | GQGTQVTVSS |
| 127 | Amino Acid | EVRLVESGGGLVQPGGSLRLSCAVSKNIFSIYRVD |
| | | WYHQAPGKQRELVAGWTSGGSTSYADAVKGRFTIS |
| | | TDNVKDTVYLQMNSLTPEDTAVYYCHAHDHWRDYW |
| | | GQGTQVTVSS |
| 128 | Amino Acid | EVKLVESGGGLVQPGGSLKLSCTTSGFTFSSYGLS |
| | | WIRQTPDKRLELVASINRNGDNTYYTDSVKGRFTI |
| | | SRHDAKNTLNLQMNSLKSEDTAMYYCTRGGFSYWG |
| | | QGTLVTVSA |
| 129 | Amino Acid | DIVLTQSPAIMSSSPGEKVTMTCSASSSVSYMYWY |
| | | QQRPGSSPRLLIYDTSKLASGVPVRFSGSVSGTSY |
| | | SLTISRMESEDAATYYCQQWSGFPPITFGAGTKLE |
| | | LK |
| 130 | Amino Acid | EVKLVESGGGLVQPGGSLKLSCTTSGFTFSSYGLS |
| | | WIRQTPDKRLELVASINRNGDNTYYTDSVRGRFTI |
| | | SRDNAKNTLNLQMSSLKSEDTAMYYCTRGGFSYWG |
| | | QGTLVTVSA |
| 131 | Amino Acid | DIVLTQSPATMSASPGEKVTLTCSASPGVTYMYWY |
| | | QQKPGSSPRLLIYDTSNLASGVPLRFSGSGSGTSY |
| | | SLTISRTEAEDAATYYCQQWSGYPPITFGAGTKLE |
| | | LR |
| 132 | Amino Acid | EVKLVESGGGLVQPGGSLKLSCTTSGFTFSSYGLS |
| | | WIRQTPDKRLELVASINRNGDNAYYIDSVKGRFTI |
| | | SRDNAKNALNLQMSSLKSEDTAMYYCTRGGFSHWG |
| | | QGTLVTVAA |
| 133 | Amino Acid | QIVLTQSPAIMSASPGEKVTMTCSASSSVSYMYWY |
| | | QQKPGSSPRLLIYDTSNLASGVPVRFSGSGSGTSY |
| | | SLIISRMEAEDAATYYCQQWSGYPPITFGAGTKLE |
| | | LK |
| 134 | Amino Acid | EVKLVESGGGLVQPGGSLKLSCAASGFTFSSYGLS |
| | | WVRQTPDKGLELVASINRNGGNTYYTDSVKGRFTI |
| | | SRDNAKNTLNLQMSSLKSEDTAMYYCARGGFTYWG |
| | | QGTLVTVSA |
| 135 | Amino Acid | QIVLTQSPAIMSAFPGEKVTMTCSASSSVGYMYWY |
| | | QQKPGSSPRLLIYDTSNLASGVPVRFSGSGSGTAY |
| | | SLTISRMEAEDAATYYCQQWSGYPPITFGAGTKLE |
| | | LK |
| 136 | Amino Acid | QVQLKESGGGLVRPGGSLKLSCAASGFTFSNYGMS |
| | | WIRQTPDKNLELVASINTSGGNTYYPDSVKGRFTI |
| | | SRDNARATLNLQMSNLKSEDTAIYYCTRGGFTHWG |
| | | QGTLVAVSA |
| 137 | Amino Acid | QIVLTQSPAIMSASPGEKVTMTCSASSSVSYMYWY |
| | | QQKPGSSPRLLIYDTSNLASGVPVRFSGSGSGTSY |
| | | FLTISRMEAEDAATYYCQQWTGYPPITFGAGTKLE |
| | | LR |
| 138 | Amino Acid | QVQLKESGGGLVQPGGSLKLSCAASGFPFSSYGLS |
| | | WVRQTPDKRLELVATINRNGDSAYYPDSVKGRFTI |
| | | SRDDAKNTLYLQMSSLKSEDTAMYYCTRGGFAYWG |
| | | QGTLVTVSA |
| 139 | Amino Acid | QIVLTQSPAIMSASPGEKVTMTCSGSSSVGYMYWY |
| | | QQKPGFSPRLLIYDTSNLASGVPVRFSGSGSGTSY |
| | | SLTISRMEAEDAATYYCQQWSGYPPITFGAGTKLE |
| | | LK |
| 140 | Amino Acid | EVKLVESGGGLVRPGGSLKLSCAASGFTFSNYGMS |
| | | WIRQTPDKNLELVASINTSGGNTYYPDSVKGRFTI |
| | | SRDNARATLNLQMSNLKSEDTAIYYCTRGGFTHWG |
| | | QGTLVTVSA |
| 141 | Amino Acid | DIVLTQSPAIMSASPGEKVTMTCSASSSVAFMYWY |
| | | QQKPGSSPRLLIYDTSKLASGVPVRFSGSGSGTSY |
| | | SLTISRMEAEDAATYYCQQWSGYPPITFGAGTKLE |
| | | LK |
| 142 | Amino Acid | QVQLKESGGGLVQPGGSLKLSCTTSGFTFSSYGLS |
| | | WIRQTPDKRLELVASINRNGDNTYYTDSVRGRFTI |
| | | SRDNAKSTLNLQMSSLKSEDTAMYYCTRGGFSYWG |
| | | QGTLVTVSA |
| 143 | Amino Acid | QIVLTQSPPLMSASPGEKVTMTCSASSSVGYMYWF |
| | | QQRPGSSPRLLIYDTYNLASGVPVRFSGSGSGTSY |
| | | SLTISRLEAEDAATYYCQQWSGYPPITFGAGTKLE |
| | | LR |
| 144 | Amino Acid | EVKLVESGGGLVQPGGSLKLSCAASGFTFSSYGLS |
| | | WVRQTPDKRLELVASVNRNGGNTYYTDSVKGRFTI |
| | | SRDNAKNTLNLQMSSLKSEDTAMYYCARGGFTYWG |
| | | QGTLVTVSA |
| 145 | Amino Acid | QIVLTQSPAIMSASPGEKVTMTCSASSSVGYMYWY |
| | | QQKPGSSPRLLIYDTSHLASGVPVRFSGSGSGTSY |
| | | SLTISRMEAEDAATYYCQQWSGYPPITFGAGTKLE |
| | | LK |
| 146 | Amino Acid | EVKLVESGGGLVQPGGSLKLSCAASGFPFSSYGLS |
| | | WVRQTPDKRLELVATINRNGDSAYYPDSVKGRFTI |
| | | SRDDAKNTLYLQMSSLKSEDTAMYYCTRGGFAYWG |
| | | QGTLVTVSA |
| 147 | Amino Acid | QIVLTQSPVIMSASPGEKVTMTCSASSSVGYMYWY |
| | | QQRPGSSPRLLIYDTSNLASGAPVRFSGSGSGTSY |
| | | SLTISRMEAEDAATYYCQQWSGYPPITFGAGTKLE |
| | | LK |
| 148 | Amino Acid | EVKLVESGGGLVQPGGSLKLSCTTSGFTFSSYGLS |
| | | WIRQTPDKRLELVASINRNGDNTYYTDSVKGRFTI |
| | | SRDNAKNTLNLQMSSLKSEDTAMYYCTRGGFSYWG |
| | | QGTLVTVSA |
| 149 | Amino Acid | QIVLTQSPAIMSASPGEKVTMTCSASSSVSYMYWY |
| | | QQKPGSSPRLLIYDTSNLASGVPVRFSGSGSGTSY |
| | | SLTISRMEAEDAATYYCQQWTGYPPITFGAGTKLE |
| | | LK |
| 150 | Amino Acid | EVKLVESGGVLVQPGGSLKLSCAASGFTFSSYGMS |
| | | WVRQTPDKRLELVASINKNGGSTYYPDSVKGRFTI |
| | | SRDNAKTTVYLQMSSLKSEDTAMYYCTRGGFAYWG |
| | | QGTLVTVSA |
| 151 | Amino Acid | QIVLTQSPAIMSASPGEKVTLTCSASSSVGYMYWY |
| | | QQRPGSSPRLLIYDTSNLPSGVPVRFSGSGSGTSY |
| | | SLTISRMEAEDAATYYCQQWSGYPPITFGAGTKLE |
| | | LK |
| 152 | Amino Acid | QVQLVQSGAEVKKPGSSVKVSCKASGGTFSSYAIS |
| | | WVRQAPGQGLEWMGGIIPIFGTANYAQKFQGRVTI |
| | | TADESTSTAYMELSSLRSEDTAVYYCARDILRLSV |
| | | SSGMDVWGQGTLVTVSS |
| 153 | Amino Acid | QSVLTQPPSASGTPGQRVTISCSGGSSNIGSNYVY |
| | | WYQQLPGTAPKLLIYRNNQRPSGVPDRFSGSKSGT |
| | | SASLAISGLRSEDEADYYCAAWDDSLSGHVVFGGG |
| | | TKLTVL |
| 154 | Amino Acid | QVQLVQSGAEVKKPGSSVKVSCKASGGTFSSYAIS |
| | | WVRQAPGQGLEWMGGIIPIFGTANYAQKFQGRVTI |
| | | TADESTSTAYMELSSLRSEDTAVYYCARDILRLSV |
| | | SSGMDVWGQGTLVTVSS |
| 155 | Amino Acid | QSVLTQPPSASGTPGQRVTISCSGSSSNIGSNYVY |
| | | WYQQLPGTAPKLLIYRNNQRPSGVPDRLSGSKSGT |
| | | SASLAISGLRSEDEADYYCAAWDDSLSAVVFGGGT |
| | | KLTVL |
| 156 | Amino Acid | QVQLQESGGGVVQPGRSLRLSCAASGFTLSSYGMH |
| | | WVRQAPGKGLEWVAVISYDGSNKYYADSVKGRFTI |
| | | SRDNSKNTLYLQMNSLRAEDTAVYYCAKSGWRYYY |
| | | YYGMDVWGQGTLVTVSS |
| 157 | Amino Acid | QSVLTQPPSVSGAPGQRVTISCTGSSSNIGAGYDV |
| | | HWYQQLPGTAPKLLIYGNSNRPSGVPDRFSGSKSG |
| | | TSASLAITGLQAEDEADYYCQSYDSSLSGSVFGGG |
| | | TKLTVL |
| 158 | Amino Acid | QVQLVQSGAEVKKPGSSVKVSCKASGGTFSSYAIS |
| | | WVRQAPGQGLEWMGGIIPIFGTANYAQKFQGRVTI |
| | | TADESTSTAYMELSSLRSEDTAVYYCARDILRLSV |
| | | SSGMDVWGQGTMVTVSS |
| 159 | Amino Acid | QSVLTQPPSASGTPGQRVTISCSGSSSNIGSNYVY |
| | | WYQQLPGTAPKLLIYRNNQRPSGVPDRFSGSKSGT |
| | | SASLAISGLRSEDEADYYCAAWDDSLSGPSVVFGG |
| | | GTKLTVL |
| 160 | Amino Acid | QVQLVQSGAEVKKPGASVKVSCKASGYTFTSYGIS |
| | | WVRQAPGQGLEWMGWIGAYNGNTNYAQKLQGRVTM |
| | | TTDTSTSTAYMELRSLRSDDTAVYYCARDLRRYSS |
| | | SWDGPGYWGQGTLVTVSS |
| 161 | Amino Acid | QSALTQPASVSGSPGQSITISCTGTSSDVGGYNYV |
| | | SWYQQHPGKAPKLMIYDVSNRPSGVSNRFSGSKSG |
| | | NTASLTISGLQAEDEADYYCSSYTSSSTRVFGTGT |
| | | KLTVL |
| 162 | Amino Acid | QVQLVQSGAEVKKPGSSVKVSCKASGGTFSSYAIS |
| | | WVRQAPGQGLEWMGGIIPIFGTANYAQKFQGRVTI |
| | | TADESTSTAYMELSSLRSEDTAVYYCARDILRLSV |
| | | SSGMDVWGQGTLVTVSS |
| 163 | Amino Acid | SYVLTQPPSASGTPGQRVTISCSGSSSNIGGNYVY |
| | | WYQQLPGTAPKLLIYRNNQRPSGVPDRFSGSKSGT |
| | | SASLAISGLRSEDEADYYCAAWDDSLSGWVFGGGT |
| | | KLTVL |
| 164 | Amino Acid | QVQLVQSGAEVKKPGSSVKVSCKASGGTFSSYAIS |
| | | WVRQAPGQGLEWMGGIIPIFGTANYAQKFQGRVTI |
| | | TADKSTSTAYMELSSLRSEDTAVYYCARDGGRYSY |
| | | GRSFDYWGQGTLVTVSS |
| 165 | Amino Acid | QSVLTQPPSVSGAPGQRVTISCTGSSSNIGAGYDV |
| | | HWYQQLPGTAPKLLIYGNSNRPSGVPDRFSGSKSG |
| | | TSASLAITGLQAEDEADYYCQSYDSSLSGPVVFGG |
| | | GTKLTVL |
| 166 | Amino Acid | QVQLVQSGAEVKKPGSSVKVSCKASGGTFSSYAIS |
| | | WVRQAPGQGLEWMGGIIPIFGTANYAQKFQGRVTI |
| | | TADESTSTAYMELSSLRSEDTAVYYCARPLRPLHY |
| | | YGMDVWGQGTLVTVSS |
| 167 | Amino Acid | QSVLTQPPSASGTPGQRVTISCSGSSSNIGSNYVY |
| | | WYQQLPGTAPKLLIYRNNQRPSGVPDRFSGSKSGT |
| | | SASLAISGLRSEDEADYYCAAWDDSLTEGVFGGGT |
| | | KLTVL |
| 168 | Amino Acid | QVQLVESGGGVVQPGRSLRLSCAASGFTFSSYGMH |
| | | WVRRAPGKGLEWVAVISYDGSNKYYADSVKGRFTI |
| | | SRDNSKNTLYLQMNSLRAEDTAVYYCAKDGGDSGS |
| | | LDYWGQGTLVTVSS |
| 169 | Amino Acid | DIVMTQSPDSLAVSLGERATINCKSSQSVLYSSNN |
| | | KNYLAWYQQKPGQPPKLLIYWASTRESGVPDRFSG |
| | | SGSGTDFTLTISSLQAEDVAVYYCQQYYSTPLTFG |
| | | GGTKLEIK |
| 170 | Amino Acid | EVQLLESGGGLVQPGGSLRLSCAASGFTFSSYWMS |
| | | WVRQAPGKGLEWVANIKQDGSEKYYVDSVKGRFTI |
| | | SRDNAKNSLYLQMNSLRAEDTAVYYCARPAGQLLY |
| | | GMDVWGQGTLVTVSS |
| 171 | Amino Acid | SYVLTQPPSVSVSPGQTARITCSGDALPKQYAYWY |
| | | QQKPGQAPVLVIYKDSERPSGIPERFSGSSSGTTV |
| | | TLTISGVQAEDEADYYCQSADSSGTWVFGGGTKLT |
| | | VL |
| 172 | Amino Acid | EVQLLESGGGVVQPGRSLRLSCAASGFTFSSYGMH |
| | | WVRQAPGKGLEWVAVISYDGSNKYYADSVKGRFTI |
| | | SRDNSKNTLYLQMNSLRAEDTAVYYCAKDAADMGA |
| | | FDYWGQGTLVTVSS |
| 173 | Amino Acid | DIQMTQSPDSLAVSLGERATMNCKSSQSVLYSSNN |
| | | KNYLAWYQQKPGQPPKLLIYWASARESGVPDRFSG |
| | | SGSGTDFTLTISSLQAEDVAVYYCQQYYSTPLTFG |
| | | QGTKVEIK |
| 174 | Amino Acid | EVQLLESGGGLVKPGGSLRLSCAASGFTFSSYSMN |
| | | WVRQAPGKGLEWVSAISGSGGSTYYADSVKGRFTI |
| | | SRDNSKNTLYLQMNSLRAEDTAVYYCARARGYSYG |
| | | SDAFDIWGQGTMVTVSS |
| 175 | Amino Acid | QSVLTQPPSASGTPGQRVTISCSGSSSNIGSNYVY |
| | | WYQQLPGTAPKLLIYRNNQRPSGVPDRFSGSKSGT |
| | | SASLAISGLRSEDEADYYCAAWDDSLSGVVFGGGT |
| | | KLTVL |
| 176 | Amino Acid | QVQLVQSGGGVVQPGRSLRLSCAASGFTFSSYGMH |
| | | WVRQAPGKGLEWVAVISYDGSNKYYADSVKGRFTI |
| | | SRDNSKNTLYLQMNSLRAEDTAVYYCAKGVPRYYY |
| | | YYGMDVWGQGTMVTVSS |
| 177 | Amino Acid | QSVLTQPPSVSGAPGQRVTISCTGSSSNIGAGYDV |
| | | HWYQQLPGTAPKLLIYGNSNRPSGVPDRFSGSKSG |
| | | TSASLAITGLQAEDEADYYCQSYDSSLSGSVFGGG |
| | | TKLTVL |
| 178 | Amino Acid | EVQLVQSGAEVKKPGSSVKVSCKASGGTFSSYAIS |
| | | WVRQAPGQGLEWMGGIIPIFGTANYAQKFQGRVTI |
| | | TADESTSTAYMELSSLRSEDTAVYYCARDRGRRYC |
| | | SGGSCPNAFDIWGQGTMVTVSS |
| 179 | Amino Acid | EIVLTQSPATLSVSPGERATLSCRASQSVSSNLAW |
| | | YQQKPGQAPRLLIYGASTRATGIPARFSGSGSGTE |
| | | FTLTISSLQSEDFAVYYCQQYNNWPPALTFGGGTK |
| | | VEIK |
| 180 | Amino Acid | QVQLVQSGAEVKKPGSSVKVSCKASGGTFSSYAIS |
| | | WVRQAPGQGLEWMGGIIPIFGTANYAQKFQGRVTI |
| | | TADESTSTAYMELSSLRSEDTAVYYCARGGYVWGS |
| | | YRQNSNWFDPWGQGTLVTVSS |
| 181 | Amino Acid | SYVLTQPPSASGTPGQRVTISCSGSSSNIGSNYVY |
| | | WYQQLPGTAPKLLIYRNNQRPSGVPDRFSGSKSGT |
| | | SASLAISGLRSEDEADYYCAAWDDSLSGWVFGGGT |
| | | KLTVL |
| 182 | Amino Acid | QVQLVESGAEVKKPGSSVKVSCKASGGTFSSYAIS |
| | | WVRQAPGQGLEWMGGIIPIFGTANYAQKFQGRVTI |
| | | TADESTSTAYMELSSLRSEDTAVYYCARDILRLSV |
| | | SSGMDVWGQGTLVTVSS |
| 183 | Amino Acid | QSVLTQPPSASGTPGRRVTISCSGSSSNIGSNYVY |
| | | WYQQLPGTAPKLLIYRNNQRPSGVPDRFSGSKSGT |
| | | SASLAISGLRSEDEADYYCAAWDDSLSGVVFGGGT |
| | | KLTVL |
| 184 | Amino Acid | QVQLVESGGGLVQPGGSLRLSCAASGFTFSSYWMS |
| | | WVRQAPGKGLEWVANIKQDGSEKYYVDSVKGRFTI |
| | | SRDNAKNSLYLQMNSLRAEDTAVYYCARWSHYYDS |
| | | SGLDYWGQGTLVTVSS |
| 185 | Amino Acid | SYVLTQPPSVSVSPGQTARITCSGDALPKQYAYWY |
| | | QQKPGQAPVLVIYKDSERPSGIPERFSGSSSGTTV |
| | | TLTISGVQAEDEADYYCQSADSSGTWVFGGGTKLT |
| | | VL |
| 186 | Amino Acid | QVQLVESGAEVKKPGSSVKVSCKASGGTFSSYAIS |
| | | WVRQAPGQGLEWMGGIIPIFGTANYAQKFQGRVTI |
| | | TADKSTSTAYMELSSLRSEDTAVYYCARTHLPYSY |
| | | GLGGFDYWGQGTLVTVSS |
| 187 | Amino Acid | QSVLTQPPSVSGAPGQRVTISCTGSSSNIGAGYDV |
| | | HWYQQLPGTAPKLLIYGNSNRPSGVPDRFSGSKSG |
| | | TSASLAITGLQAEDEADYYCQSYDSSLSGPVVFGG |
| | | GTKVTVL |
| 188 | Amino Acid | EVQLVQSGAEVKKPGSSVKVSCKASGGTFSSYAIS |
| | | WVRQAPGQGLEWMGGIIPIFGTANYAQKFQGRVTI |
| | | TADESTSTAYMELSSLRSEDTAVYYCARDPSRDYY |
| | | GSGRFSWFDPWGQGTLVTVSS |
| 189 | Amino Acid | QSVLTQPPSASGTPGQRVTISCSGSSSNIGSNYVY |
| | | WYQQLPGTAPKLLIYRNNQRPSGVPDRFSGSKSGT |
| | | SASLAISGLRSEDEADYYCAAWDDSLSGRGVFGGG |
| | | TKLTVL |
| 190 | Amino Acid | QVQLVQSGAEVKKPGASVKVSCKASGYTFTSYGIS |
| | | WVRQAPGQGLEWMGWISAYNGNTNYAQKLQGRVTM |
| | | TTDTSTSTAYMELRSLRSDDTAVYYCARDIIRYCS |
| | | STSCYRGIDYWGQGTLVTVSS |
| 191 | Amino Acid | QSALTQPASVSGSPGQSITISCTGTSSDVGGYNYV |
| | | SWYQQHPGKAPKLMIYDVSNRPSGVSNRFSGSKSG |
| | | NTASLTISGLQAEDEADYYCSSYTSSSPHVVSGGG |
| | | TKLTVL |
| 192 | Amino Acid | QVQLVESGGGVVQPGRSLRLSCAASGFTFSSYGMH |
| | | WVRQAPGKGLEWVAVISYDGSNKYYADSVKGRFTI |
| | | SRDNSKNTLYLQMNSLRAEDTAVYYCARDGTDYRG |
| | | AFDIWGQGTMVTVSS |
| 193 | Amino Acid | DIQLTQSPDSLAVPLGERATINCKSSQSVLYSSNN |
| | | KNYLAWYQQKPGQPPKLLIYWASTRESGVPDRFSG |
| | | SGSGTDFTLTISSLQAEDVAVYYCQQYYSTPLTFG |
| | | QGTKLEIK |
| 194 | Amino Acid | EVQLVQSGAEVKKPGSSVRVSCKASGGTFSSYAIS |
| | | WVRQAPGQGLEWMGGIIPIFGTANYAQKFQGRVTI |
| | | TADKSTSTAYMELSSLRSEDTAVYYCARGGGRWLH |
| | | SRLDVWGQGTTVTVSS |
| 195 | Amino Acid | QSVLTQPPSVSGAPGQRVTISCTGSSSNIGAGYDV |
| | | HWYQQFPGTAPKLLIFGNNNRPSGVPDRFSGSKSG |
| | | TSASLAITGLQAEDEANYYCQSYDRSLSGPVVFGG |
| | | GTKLTVL |
| 196 | Amino Acid | EVQLVESGGGVVQPGRSLRLSCAASGFTFSSYGMH |
| | | WVRQAPGKGLEWVAVISYDGSNKYYADSVKGRFTI |
| | | SRDNSKNTLYLQMNSLRAEDTAVYYCAKDAGDLGA |
| | | FDIWGQGTMVTVSS |
| 197 | Amino Acid | DIVMTQSPDSLAVSLGERATINCKSSQSVLYSSNN |
| | | KNYLAWYQQKPGQPPKLLIYWASTRESGVPDRFSG |
| | | SGSGTDFTLTISSLQAEDVAVYYCQQYYSTPLTFG |
| | | PGTKVEIK |
| 198 | Amino Acid | QVQLVQSGGGVVQPGRSLRLSCAASGFTFSSYAMH |
| | | WVRQAPGKGLEWVAVISYDGSNKYYADSVKGRFTI |
| | | SRDNSKNTLYLQMNSLRAEDTAVYYCARGRVYYYD |
| | | SSGYSYWGQGTLVTVSS |
| 199 | Amino Acid | QSVLTQPPSVSGAPGQRVTISCTGSSSNIGAGYDV |
| | | HWYQQLPGTAPKLLIYGNSNRPSGVPDRFSGSKSG |
| | | TSASLAITGLQAEDEADYYCQSYDSSLSGREVFGT |
| | | GTKLTVL |
| 200 | Amino Acid | QVQLVESGAEVKKPGSSVKVSCKASGGTFSSYAIS |
| | | WVRQAPGQGLEWMGGIIPIFGTANYAQKFQGRVTI |
| | | TADESTSTAYMELSSLRSEDTAVYYCARPLYAPRF |
| | | GYGMDVWGQGTLVTVSS |
| 201 | Amino Acid | QSVLTQPPSASGTPGQRVTISCSGSSSNIGSNYVY |
| | | WYQQLPGTAPKLLIYRNNQRPSGVPDRFSGSKSGT |
| | | SASLAISGLRSEDEADYYCAAWDDSLSGWVFGGGT |
| | | QLTVL |
| 202 | Amino Acid | EVQLLESGGGLVQPGGSLRLSCAASGFTFSSYAMS |
| | | WVRQAPGKGLEWVSAISGSGGSTYYADSVKGRFTI |
| | | SRDNSKNTLYLQMNSLRAEDTAVYYCAKDRGGQRG |
| | | FDYWGQGTLVTVSS |
| 203 | Amino Acid | QSVLTQPPSASGTPGQRVTISCSGSSSNIGSNYVY |
| | | WYQQLPGTAPKLLIYRNNQRPSGVPDRFSGSKSGT |
| | | SASLAISGLRSEDEADYYCAAWDDSLSGLVFGGGT |
| | | KLTVL |
| 204 | Amino Acid | SYAIS |
| 205 | Amino Acid | GIIPIFGTANYAQKFQG |
| 206 | Amino Acid | DGGRYSYGRSFDY |
| 207 | Amino Acid | TGSSSNIGAGYDVH |
| 208 | Amino Acid | GNSNRPS |
| 209 | Amino Acid | QSYDSSLSGPVV |
| 210 | Amino Acid | SYAIS |
| 211 | Amino Acid | GIIPIFGTANYAQKFQG |
| 212 | Amino Acid | DILRLSVSSGMDV |
| 213 | Amino Acid | SGGSSNIGSNYVY |
| 214 | Amino Acid | RNNQRPS |
| 215 | Amino Acid | AAWDDSLSGHVV |
| 216 | Amino Acid | SYAIS |
| 217 | Amino Acid | GIIPIFGTANYAQKFQG |
| 218 | Amino Acid | DILRLSVSSGMDV |
| 219 | Amino Acid | SGSSSNIGGNYVY |
| 220 | Amino Acid | RNNQRPS |
| 221 | Amino Acid | AAWDDSLSGWV |
| 222 | Amino Acid | SYAIS |
| 223 | Amino Acid | GIIPIFGTANYAQKFQG |
| 224 | Amino Acid | DILRLSVSSGMDV |
| 225 | Amino Acid | SGSSSNIGSNYVY |
| 226 | Amino Acid | RNNQRPS |
| 227 | Amino Acid | AAWDDSLSAVV |
| 228 | Amino Acid | SYAIS |
| 229 | Amino Acid | GIIPIFGTANYAQKFQG |
| 230 | Amino Acid | DILRLSVSSGMDV |
| 231 | Amino Acid | SGSSSNIGSNYVY |
| 232 | Amino Acid | RNNQRPS |
| 233 | Amino Acid | AAWDDSLSGPSVV |
| 234 | Amino Acid | SYAIS |
| 235 | Amino Acid | GIIPIFGTANYAQKFQG |
| 236 | Amino Acid | PLRPLHYYGMDV |
| 237 | Amino Acid | SGSSSNIGSNYVY |
| 238 | Amino Acid | RNNQRPS |
| 239 | Amino Acid | AAWDDSLTEGV |
| 240 | Amino Acid | SYGIS |
| 241 | Amino Acid | WIGAYNGNTNYAQKLQG |
| 242 | Amino Acid | DLRRYSSSWDGPGY |
| 243 | Amino Acid | TGTSSDVGGYNYVS |
| 244 | Amino Acid | DVSNRPS |
| 245 | Amino Acid | SSYTSSSTRV |
| 246 | Amino Acid | SYGMH |
| 247 | Amino Acid | VISYDGSNKYYADSVKG |
| 248 | Amino Acid | SGWRYYYYYGMDV |
| 249 | Amino Acid | TGSSSNIGAGYDVH |
| 250 | Amino Acid | GNSNRPS |
| 251 | Amino Acid | QSYDSSLSGSV |
| 252 | Amino Acid | SYAIS |
| 253 | Amino Acid | GIIPIFGTANYAQKFQG |
| 254 | Amino Acid | DILRLSVSSGMDV |
| 255 | Amino Acid | SGSSSNIGSNYVY |
| 256 | Amino Acid | RNNQRPS |
| 257 | Amino Acid | AAWDDSLSGVV |
| 258 | Amino Acid | SYAIS |
| 259 | Amino Acid | GIIPIFGTANYAQKFQG |
| 260 | Amino Acid | DPSRDYYGSGRFSWFDP |
| 261 | Amino Acid | SGSSSNIGSNYVY |
| 262 | Amino Acid | RNNQRPS |
| 263 | Amino Acid | AAWDDSLSGRGV |
| 264 | Amino Acid | SYAIS |
| 265 | Amino Acid | GIIPIFGTANYAQKFQG |
| 266 | Amino Acid | DRGRRYCSGGSCPNAFDI |
| 267 | Amino Acid | RASQSVSSNLA |
| 268 | Amino Acid | GASTRAT |
| 269 | Amino Acid | QQYNNWPPALT |
| 270 | Amino Acid | SYAIS |
| 271 | Amino Acid | GIIPIFGTANYAQKFQG |
| 272 | Amino Acid | GGGRWLHSRLDV |
| 273 | Amino Acid | TGSSSNIGAGYDVH |
| 274 | Amino Acid | GNNNRPS |
| 275 | Amino Acid | QSYDRSLSGPVV |
| 276 | Amino Acid | SYAIS |
| 277 | Amino Acid | GIIPIFGTANYAQKFQG |
| 278 | Amino Acid | GGYVWGSYRQNSNWFDP |
| 279 | Amino Acid | SGSSSNIGSNYVY |
| 280 | Amino Acid | RNNQRPS |
| 281 | Amino Acid | AAWDDSLSGWV |
| 282 | Amino Acid | SYAIS |
| 283 | Amino Acid | GIIPIFGTANYAQKFQG |
| 284 | Amino Acid | PLYAPRFGYGMDV |
| 285 | Amino Acid | SGSSSNIGSNYVY |
| 286 | Amino Acid | RNNQRPS |
| 287 | Amino Acid | AAWDDSLSGWV |
| 288 | Amino Acid | SYAIS |
| 289 | Amino Acid | GIIPIFGTANYAQKFQG |
| 290 | Amino Acid | THLPYSYGLGGFDY |
| 291 | Amino Acid | TGSSSNIGAGYDVH |
| 292 | Amino Acid | GNSNRPS |
| 293 | Amino Acid | QSYDSSLSGPVV |
| 294 | Amino Acid | SYAMH |
| 295 | Amino Acid | VISYDGSNKYYADSVKG |
| 296 | Amino Acid | GRVYYYDSSGYSY |
| 297 | Amino Acid | TGSSSNIGAGYDVH |
| 298 | Amino Acid | GNSNRPS |
| 299 | Amino Acid | QSYDSSLSGREV |
| 300 | Amino Acid | SYAMS |
| 301 | Amino Acid | AISGSGGSTYYADSVKG |
| 302 | Amino Acid | DRGGQRGFDY |
| 303 | Amino Acid | SGSSSNIGSNYVY |
| 304 | Amino Acid | RNNQRPS |
| 305 | Amino Acid | AAWDDSLSGLV |
| 306 | Amino Acid | SYGIS |
| 307 | Amino Acid | WISAYNGNTNYAQKLQG |
| 308 | Amino Acid | DIIRYCSSTSCYRGIDY |
| 309 | Amino Acid | TGTSSDVGGYNYVS |
| 310 | Amino Acid | DVSNRPS |
| 311 | Amino Acid | SSYTSSSPHVV |
| 312 | Amino Acid | SYGMH |
| 313 | Amino Acid | VISYDGSNKYYADSVKG |
| 314 | Amino Acid | DAADMGAFDY |
| 315 | Amino Acid | KSSQSVLYSSNNKNYLA |
| 316 | Amino Acid | WASARES |
| 317 | Amino Acid | QQYYSTPLT |
| 318 | Amino Acid | SYGMH |
| 319 | Amino Acid | VISYDGSNKYYADSVKG |
| 320 | Amino Acid | DAGDLGAFDI |
| 321 | Amino Acid | KSSQSVLYSSNNKNYLA |
| 322 | Amino Acid | WASTRES |
| 323 | Amino Acid | QQYYSTPLT |
| 324 | Amino Acid | SYGMH |
| 325 | Amino Acid | VISYDGSNKYYADSVKG |
| 326 | Amino Acid | DGGDSGSLDY |
| 327 | Amino Acid | KSSQSVLYSSNNKNYLA |
| 328 | Amino Acid | WASTRES |
| 329 | Amino Acid | QQYYSTPLT |
| 330 | Amino Acid | SYGMH |
| 331 | Amino Acid | VISYDGSNKYYADSVKG |
| 332 | Amino Acid | DGTDYRGAFDI |
| 333 | Amino Acid | KSSQSVLYSSNNKNYLA |
| 334 | Amino Acid | WASTRES |
| 335 | Amino Acid | QQYYSTPLT |
| 336 | Amino Acid | SYGMH |
| 337 | Amino Acid | VISYDGSNKYYADSVKG |
| 338 | Amino Acid | GVPRYYYYYGMDV |
| 339 | Amino Acid | TGSSSNIGAGYDVH |
| 340 | Amino Acid | GNSNRPS |
| 341 | Amino Acid | QSYDSSLSGSV |
| 342 | Amino Acid | SYSMN |
| 343 | Amino Acid | AISGSGGSTYYADSVKG |
| 344 | Amino Acid | ARGYSYGSDAFDI |
| 345 | Amino Acid | SGSSSNIGSNYVY |
| 346 | Amino Acid | RNNQRPS |
| 347 | Amino Acid | AAWDDSLSGVV |
| 348 | Amino Acid | SYWMS |
| 349 | Amino Acid | NIKQDGSEKYYVDSVKG |
| 350 | Amino Acid | PAGQLLYGMDV |
| 351 | Amino Acid | SGDALPKQYAY |
| 352 | Amino Acid | KDSERPS |
| 353 | Amino Acid | QSADSSGTWV |
| 354 | Amino Acid | SYWMS |
| 355 | Amino Acid | NIKQDGSEKYYVDSVKG |
| 356 | Amino Acid | WSHYYDSSGLDY |
| 357 | Amino Acid | SGDALPKQYAY |
| 358 | Amino Acid | KDSERPS |
| 359 | Amino Acid | QSADSSGTWV |
| 360 | Amino Acid | RNIFSLYRVD |
| 361 | Amino Acid | GSTSGGTTTYADA |
| 362 | Amino Acid | HAHDHWRDS |
| 363 | Amino Acid | RNIFSMYRVD |
| 364 | Amino Acid | GITSGGTTSYADA |
| 365 | Amino Acid | HAHDHWRDS |
| 366 | Amino Acid | RNIASLYRVD |
| 367 | Amino Acid | GRTSGGTTTYLDA |
| 368 | Amino Acid | HAHDHWRDS |
| 369 | Amino Acid | GRTGSSYAMG |
| 370 | Amino Acid | AITWSGGITAYADS |
| 371 | Amino Acid | AAGVTGSPSFDS |
| 372 | Amino Acid | GRTFSSYAMG |
| 373 | Amino Acid | AISGSGGSIYYGDS |
| 374 | Amino Acid | AAGPLGSPDFDS |
| 375 | Amino Acid | GRTFSSYAMG |
| 376 | Amino Acid | AISGSGGSIYYGDS |
| 377 | Amino Acid | AAGPLGSPDFDS |
| 378 | Amino Acid | GRTGSSYAMG |
| 379 | Amino Acid | AITWSGGITAYADS |
| 380 | Amino Acid | AAGVTGSPSFDS |
| 381 | Amino Acid | GRTFSSYAMG |
| 382 | Amino Acid | AISGSGGVTFYAHS |
| 383 | Amino Acid | AGGAHGSPDFGS |
| 384 | Amino Acid | GSIGSIYAMG |
| 385 | Amino Acid | TTTSGGTTNYADS |
| 386 | Amino Acid | KIQTHWYVY |
| 387 | Amino Acid | GSIGSIYRKG |
| 388 | Amino Acid | TITSAGTTNYADS |
| 389 | Amino Acid | NFQTHWYVY |
| 390 | Amino Acid | KNIFSIYRVD |
| 391 | Amino Acid | GWTSGGSTSYADA |
| 392 | Amino Acid | HAHDHWRDY |
| 393 | Amino Acid | SGFTFSSYGLSWI |
| 394 | Amino Acid | SINRNGDNTYYT |
| 395 | Amino Acid | TRGGFSY |
| 396 | Amino Acid | SASSSVSY |
| 397 | Amino Acid | DTSKLA |
| 398 | Amino Acid | QQWSGFPPITF |
| 399 | Amino Acid | SGFTFSSYGLSWI |
| 400 | Amino Acid | SINRNGDNTYYT |
| 401 | Amino Acid | TRGGFSY |
| 402 | Amino Acid | SASPGVTY |
| 403 | Amino Acid | DTSNLA |
| 404 | Amino Acid | QQWSGYPPITF |
| 405 | Amino Acid | SGFTFSSYGLSWI |
| 406 | Amino Acid | SINRNGDNAYYI |
| 407 | Amino Acid | TRGGFSH |
| 408 | Amino Acid | SASSSVSY |
| 409 | Amino Acid | DTSNLA |
| 410 | Amino Acid | QQWSGYPPITF |
| 411 | Amino Acid | SGFTFSSYGLSWV |
| 412 | Amino Acid | SINRNGGNTYYT |
| 413 | Amino Acid | ARGGFTY |
| 414 | Amino Acid | SASSSVGY |
| 415 | Amino Acid | DTSNLA |
| 416 | Amino Acid | QQWSGYPPITF |
| 417 | Amino Acid | SGFTFSNYGMSWI |
| 418 | Amino Acid | SINTSGGNTYYP |
| 419 | Amino Acid | TRGGFTH |
| 420 | Amino Acid | SASSSVSY |
| 421 | Amino Acid | DTSNLA |
| 422 | Amino Acid | QQWTGYPPITF |
| 423 | Amino Acid | SGFPFSSYGLSWV |
| 424 | Amino Acid | TINRNGDSAYYP |
| 425 | Amino Acid | TRGGFAY |
| 426 | Amino Acid | SGSSSVGY |
| 427 | Amino Acid | DTSNLA |
| 428 | Amino Acid | CQQWSGYPPITF |
| 429 | Amino Acid | SGFTFSNYGMSWI |
| 430 | Amino Acid | SINTSGGNTYYP |
| 431 | Amino Acid | TRGGFTH |
| 432 | Amino Acid | SASSSVAF |
| 433 | Amino Acid | DTSKLA |
| 434 | Amino Acid | CQQWSGYPPITF |
| 435 | Amino Acid | SGFTFSSYGLSWI |
| 436 | Amino Acid | SINRNGDNTYYT |
| 437 | Amino Acid | TRGGFSY |
| 438 | Amino Acid | SASSSVGY |
| 439 | Amino Acid | DTYNLA |
| 440 | Amino Acid | CQQWSGYPPITF |
| 441 | Amino Acid | SGFTFSSYGLSWV |
| 442 | Amino Acid | SVNRNGGNTYYT |
| 443 | Amino Acid | ARGGFTY |
| 444 | Amino Acid | SASSSVGY |
| 445 | Amino Acid | DTSHLA |
| 446 | Amino Acid | CQQWSGYPPITF |
| 447 | Amino Acid | SGFPFSSYGLSWV |
| 448 | Amino Acid | TINRNGDSAYYP |
| 449 | Amino Acid | TRGGFAY |
| 450 | Amino Acid | SASSSVGY |
| 451 | Amino Acid | DTSNLA |
| 452 | Amino Acid | CQQWSGYPPITF |
| 453 | Amino Acid | SGFTFSSYGLSWI |
| 454 | Amino Acid | SINRNGDNTYYT |
| 455 | Amino Acid | TRGGFSY |
| 456 | Amino Acid | SASSSVSY |
| 457 | Amino Acid | DTSNLA |
| 458 | Amino Acid | CQQWTGYPPITF |
| 459 | Amino Acid | SGFTFSSYGMSWV |
| 460 | Amino Acid | SINKNGGSTYYP |
| 461 | Amino Acid | TRGGFAY |
| 462 | Amino Acid | SASSSVGY |
| 463 | Amino Acid | DTSNLP |
| 464 | Amino Acid | CQQWSGYPPITF |
| 465 | Amino Acid | MALPVTALLLPLALLLHAARPQVQLVQSGAEVKKP |
| | | GSSVKVSCKASGGTFSSYAISWVRQAPGQGLEWMG |
| | | GIIPIFGTANYAQKFQGRVTITADESTSTAYMELS |
| | | SLRSEDTAVYYCARDILRLSVSSGMDVWGQGTLVT |
| | | VSSGSTSGSGKPGSGEGSTKGQSVLTQPPSASGTP |
| | | GQRVTISCSGGSSNIGSNYVYWYQQLPGTAPKLLI |
| | | YRNNQRPSGVPDRFSGSKSGTSASLAISGLRSEDE |
| | | ADYYCAAWDDSLSGHVVFGGGTKLTVLEQKLISEE |
| | | DLNPGGGGGSGGGGSGGGGSGGGGSGSMDIQMTQS |
| | | PSSLSASVGDRVTITCRASQDIRNYLNWYQQKPGK |
| | | APKLLIYYTSRLESGVPSRFSGSGSGTDYTLTISS |
| | | LQPEDFATYYCQQGNTLPWTFGQGTKVEIKGGGGS |
| | | GGGGSGGGGSEVQLVESGGGLVQPGGSLRLSCAAS |
| | | GYSFTGYTMNWVRQAPGKGLEWVALINPTKGVSTY |
| | | NQKFKDRFTISVDKSKNTAYLQMNSLRAEDTAVYY |
| | | CARSGYYGDSDWYFDVWGQGTLVTVSSTSGGGGSL |
| | | ESGQVLLESNIKVLPTWSTPVQPMALIVLGGVAGL |
| | | LLFIGLGIFFCVRCRHRRRQAERMSQIKRLLSEKK |
| | | TCQCPHRFQKTCSPI |
| 466 | Amino Acid | MALPVTALLLPLALLLHAARPQVQLVQSGAEVKKP |
| | | GSSVKVSCKASGGTFSSYAISWVRQAPGQGLEWMG |
| | | GIIPIFGTANYAQKFQGRVTITADESTSTAYMELS |
| | | SLRSEDTAVYYCARDILRLSVSSGMDVWGQGTLVT |
| | | VSSGSTSGSGKPGSGEGSTKGQSVLTQPPSASGTP |
| | | GQRVTISCSGSSSNIGSNYVYWYQQLPGTAPKLLI |
| | | YRNNQRPSGVPDRLSGSKSGTSASLAISGLRSEDE |
| | | ADYYCAAWDDSLSAVVFGGGTKLTVLEQKLISEED |
| | | LNPGGGGGSGGGGSGGGGSGGGGSGSMDIQMTQSP |
| | | SSLSASVGDRVTITCRASQDIRNYLNWYQQKPGKA |
| | | PKLLIYYTSRLESGVPSRFSGSGSGTDYTLTISSL |
| | | QPEDFATYYCQQGNTLPWTFGQGTKVEIKGGGGSG |
| | | GGGSGGGGSEVQLVESGGGLVQPGGSLRLSCAASG |
| | | YSFTGYTMNWVRQAPGKGLEWVALINPTKGVSTYN |
| | | QKFKDRFTISVDKSKNTAYLQMNSLRAEDTAVYYC |
| | | ARSGYYGDSDWYFDVWGQGTLVTVSSTSGGGGSLE |
| | | SGQVLLESNIKVLPTWSTPVQPMALIVLGGVAGLL |
| | | LFIGLGIFFCVRCRHRRRQAERMSQIKRLLSEKKT |
| | | CQCPHRFQKTCSPI |
| 467 | Amino Acid | MALPVTALLLPLALLLHAARPQVQLQESGGGVVQP |
| | | GRSLRLSCAASGFTLSSYGMHWVRQAPGKGLEWVA |
| | | VISYDGSNKYYADSVKGRFTISRDNSKNTLYLQMN |
| | | SLRAEDTAVYYCAKSGWRYYYYYGMDVWGQGTLVT |
| | | VSSGSTSGSGKPGSGEGSTKGQSVLTQPPSVSGAP |
| | | GQRVTISCTGSSSNIGAGYDVHWYQQLPGTAPKLL |
| | | IYGNSNRPSGVPDRFSGSKSGTSASLAITGLQAED |
| | | EADYYCQSYDSSLSGSVFGGGTKLTVLEQKLISEE |
| | | DLNPGGGGGSGGGGSGGGGSGGGGSGSMDIQMTQS |
| | | PSSLSASVGDRVTITCRASQDIRNYLNWYQQKPGK |
| | | APKLLIYYTSRLESGVPSRFSGSGSGTDYTLTISS |
| | | LQPEDFATYYCQQGNTLPWTFGQGTKVEIKGGGGS |
| | | GGGGSGGGGSEVQLVESGGGLVQPGGSLRLSCAAS |
| | | GYSFTGYTMNWVRQAPGKGLEWVALINPTKGVSTY |
| | | NQKFKDRFTISVDKSKNTAYLQMNSLRAEDTAVYY |
| | | CARSGYYGDSDWYFDVWGQGTLVTVSSTSGGGGSL |
| | | ESGQVLLESNIKVLPTWSTPVQPMALIVLGGVAGL |
| | | LLFIGLGIFFCVRCRHRRRQAERMSQIKRLLSEKK |
| | | TCQCPHRFQKTCSPI |
| 468 | Amino Acid | MALPVTALLLPLALLLHAARPQVQLVQSGAEVKKP |
| | | GSSVKVSCKASGGTFSSYAISWVRQAPGQGLEWMG |
| | | GIIPIFGTANYAQKFQGRVTITADESTSTAYMELS |
| | | SLRSEDTAVYYCARDILRLSVSSGMDVWGQGTMVT |
| | | VSSGSTSGSGKPGSGEGSTKGQSVLTQPPSASGTP |
| | | GQRVTISCSGSSSNIGSNYVYWYQQLPGTAPKLLI |
| | | YRNNQRPSGVPDRFSGSKSGTSASLAISGLRSEDE |
| | | ADYYCAAWDDSLSGPSVVFGGGTKLTVLEQKLISE |
| | | EDLNPGGGGGSGGGGSGGGGSGGGGSGSMDIQMTQ |
| | | SPSSLSASVGDRVTITCRASQDIRNYLNWYQQKPG |
| | | KAPKLLIYYTSRLESGVPSRFSGSGSGTDYTLTIS |
| | | SLQPEDFATYYCQQGNTLPWTFGQGTKVEIKGGGG |
| | | SGGGGSGGGGSEVQLVESGGGLVQPGGSLRLSCAA |
| | | SGYSFTGYTMNWVRQAPGKGLEWVALINPTKGVST |
| | | YNQKFKDRFTISVDKSKNTAYLQMNSLRAEDTAVY |
| | | YCARSGYYGDSDWYFDVWGQGTLVTVSSTSGGGGS |
| | | LESGQVLLESNIKVLPTWSTPVQPMALIVLGGVAG |
| | | LLLFIGLGIFFCVRCRHRRRQAERMSQIKRLLSEK |
| | | KTCQCPHRFQKTCSPI |
| 469 | Amino Acid | MALPVTALLLPLALLLHAARPQVQLVQSGAEVKKP |
| | | GASVKVSCKASGYTFTSYGISWVRQAPGQGLEWMG |
| | | WIGAYNGNTNYAQKLQGRVTMTTDTSTSTAYMELR |
| | | SLRSDDTAVYYCARDLRRYSSSWDGPGYWGQGTLV |
| | | TVSSGSTSGSGKPGSGEGSTKGQSALTQPASVSGS |
| | | PGQSITISCTGTSSDVGGYNYVSWYQQHPGKAPKL |
| | | MIYDVSNRPSGVSNRFSGSKSGNTASLTISGLQAE |
| | | DEADYYCSSYTSSSTRVFGTGTKLTVLEQKLISEE |
| | | DLNPGGGGGSGGGGSGGGGSGGGGSGSMDIQMTQS |
| | | PSSLSASVGDRVTITCRASQDIRNYLNWYQQKPGK |
| | | APKLLIYYTSRLESGVPSRFSGSGSGTDYTLTISS |
| | | LQPEDFATYYCQQGNTLPWTFGQGTKVEIKGGGGS |
| | | GGGGSGGGGSEVQLVESGGGLVQPGGSLRLSCAAS |
| | | GYSFTGYTMNWVRQAPGKGLEWVALINPTKGVSTY |
| | | NQKFKDRFTISVDKSKNTAYLQMNSLRAEDTAVYY |
| | | CARSGYYGDSDWYFDVWGQGTLVTVSSTSGGGGSL |
| | | ESGQVLLESNIKVLPTWSTPVQPMALIVLGGVAGL |
| | | LLFIGLGIFFCVRCRHRRRQAERMSQIKRLLSEKK |
| | | TCQCPHRFQKTCSPI |
| 470 | Amino Acid | MALPVTALLLPLALLLHAARPQVQLVQSGAEVKKP |
| | | GSSVKVSCKASGGTFSSYAISWVRQAPGQGLEWMG |
| | | GIIPIFGTANYAQKFQGRVTITADESTSTAYMELS |
| | | SLRSEDTAVYYCARDILRLSVSSGMDVWGQGTLVT |
| | | VSSGSTSGSGKPGSGEGSTKGSYVLTQPPSASGTP |
| | | GQRVTISCSGSSSNIGGNYVYWYQQLPGTAPKLLI |
| | | YRNNQRPSGVPDRFSGSKSGTSASLAISGLRSEDE |
| | | ADYYCAAWDDSLSGWVFGGGTKLTVLEQKLISEED |
| | | LNPGGGGGSGGGGSGGGGSGGGGSGSMDIQMTQSP |
| | | SSLSASVGDRVTITCRASQDIRNYLNWYQQKPGKA |
| | | PKLLIYYTSRLESGVPSRFSGSGSGTDYTLTISSL |
| | | QPEDFATYYCQQGNTLPWTFGQGTKVEIKGGGGSG |
| | | GGGSGGGGSEVQLVESGGGLVQPGGSLRLSCAASG |
| | | YSFTGYTMNWVRQAPGKGLEWVALINPTKGVSTYN |
| | | QKFKDRFTISVDKSKNTAYLQMNSLRAEDTAVYYC |
| | | ARSGYYGDSDWYFDVWGQGTLVTVSSTSGGGGSLE |
| | | SGQVLLESNIKVLPTWSTPVQPMALIVLGGVAGLL |
| | | LFIGLGIFFCVRCRHRRRQAERMSQIKRLLSEKKT |
| | | CQCPHRFQKTCSPI |
| 471 | Amino Acid | MALPVTALLLPLALLLHAARPQVQLVQSGAEVKKP |
| | | GSSVKVSCKASGGTFSSYAISWVRQAPGQGLEWMG |
| | | GIIPIFGTANYAQKFQGRVTITADKSTSTAYMELS |
| | | SLRSEDTAVYYCARDGGRYSYGRSFDYWGQGTLVT |
| | | VSSGSTSGSGKPGSGEGSTKGQSVLTQPPSVSGAP |
| | | GQRVTISCTGSSSNIGAGYDVHWYQQLPGTAPKLL |
| | | IYGNSNRPSGVPDRFSGSKSGTSASLAITGLQAED |
| | | EADYYCQSYDSSLSGPVVFGGGTKLTVLEQKLISE |
| | | EDLNPGGGGGSGGGGSGGGGSGGGGSGSMDIQMTQ |
| | | SPSSLSASVGDRVTITCRASQDIRNYLNWYQQKPG |
| | | KAPKLLIYYTSRLESGVPSRFSGSGSGTDYTLTIS |
| | | SLQPEDFATYYCQQGNTLPWTFGQGTKVEIKGGGG |
| | | SGGGGSGGGGSEVQLVESGGGLVQPGGSLRLSCAA |
| | | SGYSFTGYTMNWVRQAPGKGLEWVALINPTKGVST |
| | | YNQKFKDRFTISVDKSKNTAYLQMNSLRAEDTAVY |
| | | YCARSGYYGDSDWYFDVWGQGTLVTVSSTSGGGGS |
| | | LESGQVLLESNIKVLPTWSTPVQPMALIVLGGVAG |
| | | LLLFIGLGIFFCVRCRHRRRQAERMSQIKRLLSEK |
| | | KTCQCPHRFQKTCSPI |
| 472 | Amino Acid | MALPVTALLLPLALLLHAARPQVQLVQSGAEVKKP |
| | | GSSVKVSCKASGGTFSSYAISWVRQAPGQGLEWMG |
| | | GIIPIFGTANYAQKFQGRVTITADESTSTAYMELS |
| | | SLRSEDTAVYYCARPLRPLHYYGMDVWGQGTLVTV |
| | | SSGSTSGSGKPGSGEGSTKGQSVLTQPPSASGTPG |
| | | QRVTISCSGSSSNIGSNYVYWYQQLPGTAPKLLIY |
| | | RNNQRPSGVPDRFSGSKSGTSASLAISGLRSEDEA |
| | | DYYCAAWDDSLTEGVFGGGTKLTVLEQKLISEEDL |
| | | NPGGGGGSGGGGSGGGGSGGGGSGSMDIQMTQSPS |
| | | SLSASVGDRVTITCRASQDIRNYLNWYQQKPGKAP |
| | | KLLIYYTSRLESGVPSRFSGSGSGTDYTLTISSLQ |
| | | PEDFATYYCQQGNTLPWTFGQGTKVEIKGGGGSGG |
| | | GGSGGGGSEVQLVESGGGLVQPGGSLRLSCAASGY |
| | | SFTGYTMNWVRQAPGKGLEWVALINPTKGVSTYNQ |
| | | KFKDRFTISVDKSKNTAYLQMNSLRAEDTAVYYCA |
| | | RSGYYGDSDWYFDVWGQGTLVTVSSTSGGGGSLES |
| | | GQVLLESNIKVLPTWSTPVQPMALIVLGGVAGLLL |
| | | FIGLGIFFCVRCRHRRRQAERMSQIKRLLSEKKTC |
| | | QCPHRFQKTCSPI |
| 473 | Amino Acid | MALPVTALLLPLALLLHAARPQVQLVESGGGVVQP |
| | | GRSLRLSCAASGFTFSSYGMHWVRRAPGKGLEWVA |
| | | VISYDGSNKYYADSVKGRFTISRDNSKNTLYLQMN |
| | | SLRAEDTAVYYCAKDGGDSGSLDYWGQGTLVTVSS |
| | | GSTSGSGKPGSGEGSTKGDIVMTQSPDSLAVSLGE |
| | | RATINCKSSQSVLYSSNNKNYLAWYQQKPGQPPKL |
| | | LIYWASTRESGVPDRFSGSGSGTDFTLTISSLQAE |
| | | DVAVYYCQQYYSTPLTFGGGTKLEIKEQKLISEED |
| | | LNPGGGGGSGGGGSGGGGSGGGGSGSMDIQMTQSP |
| | | SSLSASVGDRVTITCRASQDIRNYLNWYQQKPGKA |
| | | PKLLIYYTSRLESGVPSRFSGSGSGTDYTLTISSL |
| | | QPEDFATYYCQQGNTLPWTFGQGTKVEIKGGGGSG |
| | | GGGSGGGGSEVQLVESGGGLVQPGGSLRLSCAASG |
| | | YSFTGYTMNWVRQAPGKGLEWVALINPTKGVSTYN |
| | | QKFKDRFTISVDKSKNTAYLQMNSLRAEDTAVYYC |
| | | ARSGYYGDSDWYFDVWGQGTLVTVSSTSGGGGSLE |
| | | SGQVLLESNIKVLPTWSTPVQPMALIVLGGVAGLL |
| | | LFIGLGIFFCVRCRHRRRQAERMSQIKRLLSEKKT |
| | | CQCPHRFQKTCSPI |
| 474 | Amino Acid | MALPVTALLLPLALLLHAARPEVQLLESGGGLVQP |
| | | GGSLRLSCAASGFTFSSYWMSWVRQAPGKGLEWVA |
| | | NIKQDGSEKYYVDSVKGRFTISRDNAKNSLYLQMN |
| | | SLRAEDTAVYYCARPAGQLLYGMDVWGQGTLVTVS |
| | | SGSTSGSGKPGSGEGSTKGSYVLTQPPSVSVSPGQ |
| | | TARITCSGDALPKQYAYWYQQKPGQAPVLVIYKDS |
| | | ERPSGIPERFSGSSSGTTVTLTISGVQAEDEADYY |
| | | CQSADSSGTWVFGGGTKLTVLEQKLISEEDLNPGG |
| | | GGGSGGGGSGGGGSGGGGSGSMDIQMTQSPSSLSA |
| | | SVGDRVTITCRASQDIRNYLNWYQQKPGKAPKLLI |
| | | YYTSRLESGVPSRFSGSGSGTDYTLTISSLQPEDF |
| | | ATYYCQQGNTLPWTFGQGTKVEIKGGGGSGGGGSG |
| | | GGGSEVQLVESGGGLVQPGGSLRLSCAASGYSFTG |
| | | YTMNWVRQAPGKGLEWVALINPTKGVSTYNQKFKD |
| | | RFTISVDKSKNTAYLQMNSLRAEDTAVYYCARSGY |
| | | YGDSDWYFDVWGQGTLVTVSSTSGGGGSLESGQVL |
| | | LESNIKVLPTWSTPVQPMALIVLGGVAGLLLFIGL |
| | | GIFFCVRCRHRRRQAERMSQIKRLLSEKKTCQCPH |
| | | RFQKTCSPI |
| 475 | Amino Acid | MALPVTALLLPLALLLHAARPEVQLLESGGGVVQP |
| | | GRSLRLSCAASGFTFSSYGMHWVRQAPGKGLEWVA |
| | | VISYDGSNKYYADSVKGRFTISRDNSKNTLYLQMN |
| | | SLRAEDTAVYYCAKDAADMGAFDYWGQGTLVTVSS |
| | | GSTSGSGKPGSGEGSTKGDIQMTQSPDSLAVSLGE |
| | | RATMNCKSSQSVLYSSNNKNYLAWYQQKPGQPPKL |
| | | LIYWASARESGVPDRFSGSGSGTDFTLTISSLQAE |
| | | DVAVYYCQQYYSTPLTFGQGTKVEIKEQKLISEED |
| | | LNPGGGGGSGGGGSGGGGSGGGGSGSMDIQMTQSP |
| | | SSLSASVGDRVTITCRASQDIRNYLNWYQQKPGKA |
| | | PKLLIYYTSRLESGVPSRFSGSGS |
| | | GTDYTLTISSLQPEDFATYYCQQGNTLPWTFGQGT |
| | | KVEIKGGGGSGGGGSGGGGSEVQLVESGGGLVQPG |
| | | GSLRLSCAASGYSFTGYTMNWVRQAPGKGLEWVAL |
| | | INPTKGVSTYNQKFKDRFTISVDKSKNTAYLQMNS |
| | | LRAEDTAVYYCARSGYYGDSDWYFDVWGQGTLVTV |
| | | SSTSGGGGSLESGQVLLESNIKVLPTWSTPVQPMA |
| | | LIVLGGVAGLLLFIGLGIFFCVRCRHRRRQAERMS |
| | | QIKRLLSEKKTCQCPHRFQKTCSPI |
| 476 | Amino Acid | MALPVTALLLPLALLLHAARPEVQLLESGGGLVKP |
| | | GGSLRLSCAASGFTFSSYSMNWVRQAPGKGLEWVS |
| | | AISGSGGSTYYADSVKGRFTISRDNSKNTLYLQMN |
| | | SLRAEDTAVYYCARARGYSYGSDAFDIWGQGTMVT |
| | | VSSGSTSGSGKPGSGEGSTKGQSVLTQPPSASGTP |
| | | GQRVTISCSGSSSNIGSNYVYWYQQLPGTAPKLLI |
| | | YRNNQRPSGVPDRFSGSKSGTSASLAISGLRSEDE |
| | | ADYYCAAWDDSLSGVVFGGGTKLTVLEQKLISEED |
| | | LNPGGGGGSGGGGSGGGGSGGGGSGSMDIQMTQSP |
| | | SSLSASVGDRVTITCRASQDIRNYLNWYQQKPGKA |
| | | PKLLIYYTSRLESGVPSRFSGSGSGTDYTLTISSL |
| | | QPEDFATYYCQQGNTLPWTFGQGTKVEIKGGGGSG |
| | | GGGSGGGGSEVQLVESGGGLVQPGGSLRLSCAASG |
| | | YSFTGYTMNWVRQAPGKGLEWVALINPTKGVSTYN |
| | | QKFKDRFTISVDKSKNTAYLQMNSLRAEDTAVYYC |
| | | ARSGYYGDSDWYFDVWGQGTLVTVSSTSGGGGSLE |
| | | SGQVLLESNIKVLPTWSTPVQPMALIVLGGVAGLL |
| | | LFIGLGIFFCVRCRHRRRQAERMSQIKRLLSEKKT |
| | | CQCPHRFQKTCSPI |
| 477 | Amino Acid | MALPVTALLLPLALLLHAARPQVQLVQSGGGVVQP |
| | | GRSLRLSCAASGFTFSSYGMHWVRQAPGKGLEWVA |
| | | VISYDGSNKYYADSVKGRFTISRDNSKNTLYLQMN |
| | | SLRAEDTAVYYCAKGVPRYYYYYGMDVWGQGTMVT |
| | | VSSGSTSGSGKPGSGEGSTKGQSVLTQPPSVSGAP |
| | | GQRVTISCTGSSSNIGAGYDVHWYQQLPGTAPKLL |
| | | IYGNSNRPSGVPDRFSGSKSGTSASLAITGLQAED |
| | | EADYYCQSYDSSLSGSVFGGGTKLTVLEQKLISEE |
| | | DLNPGGGGGSGGGGSGGGGSGGGGSGSMDIQMTQS |
| | | PSSLSASVGDRVTITCRASQDIRNYLNWYQQKPGK |
| | | APKLLIYYTSRLESGVPSRFSGSGSGTDYTLTISS |
| | | LQPEDFATYYCQQGNTLPWTFGQGTKVEIKGGGGS |
| | | GGGGSGGGGSEVQLVESGGGLVQPGGSLRLSCAAS |
| | | GYSFTGYTMNWVRQAPGKGLEWVALINPTKGVSTY |
| | | NQKFKDRFTISVDKSKNTAYLQMNSLRAEDTAVYY |
| | | CARSGYYGDSDWYFDVWGQGTLVTVSSTSGGGGSL |
| | | ESGQVLLESNIKVLPTWSTPVQPMALIVLGGVAGL |
| | | LLFIGLGIFFCVRCRHRRRQAERMSQIKRLLSEKK |
| | | TCQCPHRFQKTCSPI |
| 478 | Amino Acid | MALPVTALLLPLALLLHAARPEVQLVQSGAEVKKP |
| | | GSSVKVSCKASGGTFSSYAISWVRQAPGQGLEWMG |
| | | GIIPIFGTANYAQKFQGRVTITADESTSTAYMELS |
| | | SLRSEDTAVYYCARDRGRRYCSGGSCPNAFDIWGQ |
| | | GTMVTVSSGSTSGSGKPGSGEGSTKGEIVLTQSPA |
| | | TLSVSPGERATLSCRASQSVSSNLAWYQQKPGQAP |
| | | RLLIYGASTRATGIPARFSGSGSGTEFTLTISSLQ |
| | | SEDFAVYYCQQYNNWPPALTFGGGTKVEIKEQKLI |
| | | SEEDLNPGGGGGSGGGGSGGGGSGGGGSGSMDIQM |
| | | TQSPSSLSASVGDRVTITCRASQDIRNYLNWYQQK |
| | | PGKAPKLLIYYTSRLESGVPSRFSGSGSGTDYTLT |
| | | ISSLQPEDFATYYCQQGNTLPWTFGQGTKVEIKGG |
| | | GGSGGGGSGGGGSEVQLVESGGGLVQPGGSLRLSC |
| | | AASGYSFTGYTMNWVRQAPGKGLEWVALINPTKGV |
| | | STYNQKFKDRFTISVDKSKNTAYLQMNSLRAEDTA |
| | | VYYCARSGYYGDSDWYFDVWGQGTLVTVSSTSGGG |
| | | GSLESGQVLLESNIKVLPTWSTPVQPMALIVLGGV |
| | | AGLLLFIGLGIFFCVRCRHRRRQAERMSQIKRLLS |
| | | EKKTCQCPHRFQKTCSPI |
| 479 | Amino Acid | MALPVTALLLPLALLLHAARPQVQLVQSGAEVKKP |
| | | GSSVKVSCKASGGTFSSYAISWVRQAPGQGLEWMG |
| | | GIIPIFGTANYAQKFQGRVTITADESTSTAYMELS |
| | | SLRSEDTAVYYCARGGYVWGSYRQNSNWFDPWGQG |
| | | TLVTVSSGSTSGSGKPGSGEGSTKGSYVLTQPPSA |
| | | SGTPGQRVTISCSGSSSNIGSNYVYWYQQLPGTAP |
| | | KLLIYRNNQRPSGVPDRFSGSKSGTSASLAISGLR |
| | | SEDEADYYCAAWDDSLSGWVFGGGTKLTVLEQKLI |
| | | SEEDLNPGGGGGSGGGGSGGGGSGGGGSGSMDIQM |
| | | TQSPSSLSASVGDRVTITCRASQDIRNYLNWYQQK |
| | | PGKAPKLLIYYTSRLESGVPSRFSGSGSGTDYTLT |
| | | ISSLQPEDFATYYCQQGNTLPWTFGQGTKVEIKGG |
| | | GGSGGGGSGGGGSEVQLVESGGGLVQPGGSLRLSC |
| | | AASGYSFTGYTMNWVRQAPGKGLEWVALINPTKGV |
| | | STYNQKFKDRFTISVDKSKNTAYLQMNSLRAEDTA |
| | | VYYCARSGYYGDSDWYFDVWGQGTLVTVSSTSGGG |
| | | GSLESGQVLLESNIKVLPTWSTPVQPMALIVLGGV |
| | | AGLLLFIGLGIFFCVRCRHRRRQAERMSQIKRLLS |
| | | EKKTCQCPHRFQKTCSPI |
| 480 | Amino Acid | MALPVTALLLPLALLLHAARPQVQLVESGAEVKKP |
| | | GSSVKVSCKASGGTFSSYAISWVRQAPGQGLEWMG |
| | | GIIPIFGTANYAQKFQGRVTITADESTSTAYMELS |
| | | SLRSEDTAVYYCARDILRLSVSSGMDVWGQGTLVT |
| | | VSSGSTSGSGKPGSGEGSTKGQSVLTQPPSASGTP |
| | | GRRVTISCSGSSSNIGSNYVYWYQQLPGTAPKLLI |
| | | YRNNQRPSGVPDRFSGSKSGTSASLAISGLRSEDE |
| | | ADYYCAAWDDSLSGVVFGGGTKLTVLEQKLISEED |
| | | LNPGGGGGSGGGGSGGGGSGGGGSGSMDIQMTQSP |
| | | SSLSASVGDRVTITCRASQDIRNYLNWYQQKPGKA |
| | | PKLLIYYTSRLESGVPSRFSGSGSGTDYTLTISSL |
| | | QPEDFATYYCQQGNTLPWTFGQGTKVEIKGGGGSG |
| | | GGGSGGGGSEVQLVESGGGLVQPGGSLRLSCAASG |
| | | YSFTGYTMNWVRQAPGKGLEWVALINPTKGVSTYN |
| | | QKFKDRFTISVDKSKNTAYLQMNSLRAEDTAVYYC |
| | | ARSGYYGDSDWYFDVWGQGTLVTVSSTSGGGGSLE |
| | | SGQVLLESNIKVLPTWSTPVQPMALIVLGGVAGLL |
| | | LFIGLGIFFCVRCRHRRRQAERMSQIKRLLSEKKT |
| | | CQCPHRFQKTCSPI |
| 481 | Amino Acid | MALPVTALLLPLALLLHAARPQVQLVESGGGLVQP |
| | | GGSLRLSCAASGFTFSSYWMSWVRQAPGKGLEWVA |
| | | NIKQDGSEKYYVDSVKGRFTISRDNAKNSLYLQMN |
| | | SLRAEDTAVYYCARWSHYYDSSGLDYWGQGTLVTV |
| | | SSGSTSGSGKPGSGEGSTKGSYVLTQPPSVSVSPG |
| | | QTARITCSGDALPKQYAYWYQQKPGQAPVLVIYKD |
| | | SERPSGIPERFSGSSSGTTVTLTISGVQAEDEADY |
| | | YCQSADSSGTWVFGGGTKLTVLEQKLISEEDLNPG |
| | | GGGGSGGGGSGGGGSGGGGSGSMDIQMTQSPSSLS |
| | | ASVGDRVTITCRASQDIRNYLNWYQQKPGKAPKLL |
| | | IYYTSRLESGVPSRFSGSGSGTDYTLTISSLQPED |
| | | FATYYCQQGNTLPWTFGQGTKVEIKGGGGSGGGGS |
| | | GGGGSEVQLVESGGGLVQPGGSLRLSCAASGYSFT |
| | | GYTMNWVRQAPGKGLEWVALINPTKGVSTYNQKFK |
| | | DRFTISVDKSKNTAYLQMNSLRAEDTAVYYCARSG |
| | | YYGDSDWYFDVWGQGTLVTVSSTSGGGGSLESGQV |
| | | LLESNIKVLPTWSTPVQPMALIVLGGVAGLLLFIG |
| | | LGIFFCVRCRHRRRQAERMSQIKRLLSEKKTCQCP |
| | | HRFQKTCSPI |
| 482 | Amino Acid | MALPVTALLLPLALLLHAARPQVQLVESGAEVKKP |
| | | GSSVKVSCKASGGTFSSYAISWVRQAPGQGLEWMG |
| | | GIIPIFGTANYAQKFQGRVTITADKSTSTAYMELS |
| | | SLRSEDTAVYYCARTHLPYSYGLGGFDYWGQGTLV |
| | | TVSSGSTSGSGKPGSGEGSTKGQSVLTQPPSVSGA |
| | | PGQRVTISCTGSSSNIGAGYDVHWYQQLPGTAPKL |
| | | LIYGNSNRPSGVPDRFSGSKSGTSASLAITGLQAE |
| | | DEADYYCQSYDSSLSGPVVFGGGTKVTVLEQKLIS |
| | | EEDLNPGGGGGSGGGGSGGGGSGGGGSGSMDIQMT |
| | | QSPSSLSASVGDRVTITCRASQDIRNYLNWYQQKP |
| | | GKAPKLLIYYTSRLESGVPSRFSGSGSGTDYTLTI |
| | | SSLQPEDFATYYCQQGNTLPWTFGQGTKVEIKGGG |
| | | GSGGGGSGGGGSEVQLVESGGGLVQPGGSLRLSCA |
| | | ASGYSFTGYTMNWVRQAPGKGLEWVALINPTKGVS |
| | | TYNQKFKDRFTISVDKSKNTAYLQMNSLRAEDTAV |
| | | YYCARSGYYGDSDWYFDVWGQGTLVTVSSTSGGGG |
| | | SLESGQVLLESNIKVLPTWSTPVQPMALIVLGGVA |
| | | GLLLFIGLGIFFCVRCRHRRRQAERMSQIKRLLSE |
| | | KKTCQCPHRFQKTCSPI |
| 483 | Amino Acid | MALPVTALLLPLALLLHAARPEVQLVQSGAEVKKP |
| | | GSSVKVSCKASGGTFSSYAISWVRQAPGQGLEWMG |
| | | GIIPIFGTANYAQKFQGRVTITADESTSTAYMELS |
| | | SLRSEDTAVYYCARDPSRDYYGSGRFSWFDPWGQG |
| | | TLVTVSSGSTSGSGKPGSGEGSTKGQSVLTQPPSA |
| | | SGTPGQRVTISCSGSSSNIGSNYVYWYQQLPGTAP |
| | | KLLIYRNNQRPSGVPDRFSGSKSGTSASLAISGLR |
| | | SEDEADYYCAAWDDSLSGRGVFGGGTKLTVLEQKL |
| | | ISEEDLNPGGGGGSGGGGSGGGGSGGGGSGSMDIQ |
| | | MTQSPSSLSASVGDRVTITCRASQDIRNYLNWYQQ |
| | | KPGKAPKLLIYYTSRLESGVPSRFSGSGSGTDYTL |
| | | TISSLQPEDFATYYCQQGNTLPWTFGQGTKVEIKG |
| | | GGGSGGGGSGGGGSEVQLVESGGGLVQPGGSLRLS |
| | | CAASGYSFTGYTMNWVRQAPGKGLEWVALINPTKG |
| | | VSTYNQKFKDRFTISVDKSKNTAYLQMNSLRAEDT |
| | | AVYYCARSGYYGDSDWYFDVWGQGTLVTVSSTSGG |
| | | GGSLESGQVLLESNIKVLPTWSTPVQPMALIVLGG |
| | | VAGLLLFIGLGIFFCVRCRHRRRQAERMSQIKRLL |
| | | SEKKTCQCPHRFQKTCSPI |
| 484 | Amino Acid | MALPVTALLLPLALLLHAARPQVQLVQSGAEVKKP |
| | | GASVKVSCKASGYTFTSYGISWVRQAPGQGLEWMG |
| | | WISAYNGNTNYAQKLQGRVTMTTDTSTSTAYMELR |
| | | SLRSDDTAVYYCARDIIRYCSSTSCYRGIDYWGQG |
| | | TLVTVSSGSTSGSGKPGSGEGSTKGQSALTQPASV |
| | | SGSPGQSITISCTGTSSDVGGYNYVSWYQQHPGKA |
| | | PKLMIYDVSNRPSGVSNRFSGSKSGNTASLTISGL |
| | | QAEDEADYYCSSYTSSSPHVVSGGGTKLTVLEQKL |
| | | ISEEDLNPGGGGGSGGGGSGGGGSGGGGSGSMDIQ |
| | | MTQSPSSLSASVGDRVTITCRASQDIRNYLNWYQQ |
| | | KPGKAPKLLIYYTSRLESGVPSRFSGSGSGTDYTL |
| | | TISSLQPEDFATYYCQQGNTLPWTFGQGTKVEIKG |
| | | GGGSGGGGSGGGGSEVQLVESGGGLVQPGGSLRLS |
| | | CAASGYSFTGYTMNWVRQAPGKGLEWVALINPTKG |
| | | VSTYNQKFKDRFTISVDKSKNTAYLQMNSLRAEDT |
| | | AVYYCARSGYYGDSDWYFDVWGQGTLVTVSSTSGG |
| | | GGSLESGQVLLESNIKVLPTWSTPVQPMALIVLGG |
| | | VAGLLLFIGLGIFFCVRCRHRRRQAERMSQIKRLL |
| | | SEKKTCQCPHRFQKTCSPI |
| 485 | Amino Acid | MALPVTALLLPLALLLHAARPQVQLVESGGGVVQP |
| | | GRSLRLSCAASGFTFSSYGMHWVRQAPGKGLEWVA |
| | | VISYDGSNKYYADSVKGRFTISRDNSKNTLYLQMN |
| | | SLRAEDTAVYYCARDGTDYRGAFDIWGQGTMVTVS |
| | | SGSTSGSGKPGSGEGSTKGDIQLTQSPDSLAVPLG |
| | | ERATINCKSSQSVLYSSNNKNYLAWYQQKPGQPPK |
| | | LLIYWASTRESGVPDRFSGSGSGTDFTLTISSLQA |
| | | EDVAVYYCQQYYSTPLTFGQGTKLEIKEQKLISEE |
| | | DLNPGGGGGSGGGGSGGGGSGGGGSGSMDIQMTQS |
| | | PSSLSASVGDRVTITCRASQDIRNYLNWYQQKPGK |
| | | APKLLIYYTSRLESGVPSRFSGSGSGTDYTLTISS |
| | | LQPEDFATYYCQQGNTLPWTFGQGTKVEIKGGGGS |
| | | GGGGSGGGGSEVQLVESGGGLVQPGGSLRLSCAAS |
| | | GYSFTGYTMNWVRQAPGKGLEWVALINPTKGVSTY |
| | | NQKFKDRFTISVDKSKNTAYLQMNSLRAEDTAVYY |
| | | CARSGYYGDSDWYFDVWGQGTLVTVSSTSGGGGSL |
| | | ESGQVLLESNIKVLPTWSTPVQPMALIVLGGVAGL |
| | | LLFIGLGIFFCVRCRHRRRQAERMSQIKRLLSEKK |
| | | TCQCPHRFQKTCSPI |
| 486 | Amino Acid | MALPVTALLLPLALLLHAARPEVQLVQSGAEVKKP |
| | | GSSVRVSCKASGGTFSSYAISWVRQAPGQGLEWMG |
| | | GIIPIFGTANYAQKFQGRVTITADKSTSTAYMELS |
| | | SLRSEDTAVYYCARGGGRWLHSRLDVWGQGTTVTV |
| | | SSGSTSGSGKPGSGEGSTKGQSVLTQPPSVSGAPG |
| | | QRVTISCTGSSSNIGAGYDVHWYQQFPGTAPKLLI |
| | | FGNNNRPSGVPDRFSGSKSGTSASLAITGLQAEDE |
| | | ANYYCQSYDRSLSGPVVFGGGTKLTVLEQKLISEE |
| | | DLNPGGGGGSGGGGSGGGGSGGGGSGSMDIQMTQS |
| | | PSSLSASVGDRVTITCRASQDIRNYLNWYQQKPGK |
| | | APKLLIYYTSRLESGVPSRFSGSGSGTDYT |
| | | LTISSLQPEDFATYYCQQGNTLPWTFGQGTKVEIK |
| | | GGGGSGGGGSGGGGSEVQLVESGGGLVQPGGSLRL |
| | | SCAASGYSFTGYTMNWVRQAPGKGLEWVALINPTK |
| | | GVSTYNQKFKDRFTISVDKSKNTAYLQMNSLRAED |
| | | TAVYYCARSGYYGDSDWYFDVWGQGTLVTVSSTSG |
| | | GGGSLESGQVLLESNIKVLPTWSTPVQPMALIVLG |
| | | GVAGLLLFIGLGIFFCVRCRHRRRQAERMSQIKRL |
| | | LSEKKTCQCPHRFQKTCSPI |
| 487 | Amino Acid | MALPVTALLLPLALLLHAARPEVQLVESGGGVVQP |
| | | GRSLRLSCAASGFTFSSYGMHWVRQAPGKGLEWVA |
| | | VISYDGSNKYYADSVKGRFTISRDNSKNTLYLQMN |
| | | SLRAEDTAVYYCAKDAGDLGAFDIWGQGTMVTVSS |
| | | GSTSGSGKPGSGEGSTKGDIVMTQSPDSLAVSLGE |
| | | RATINCKSSQSVLYSSNNKNYLAWYQQKPGQPPKL |
| | | LIYWASTRESGVPDRFSGSGSGTDFTLTISSLQAE |
| | | DVAVYYCQQYYSTPLTFGPGTKVEIKEQKLISEED |
| | | LNPGGGGGSGGGGSGGGGSGGGGSGSMDIQMTQSP |
| | | SSLSASVGDRVTITCRASQDIRNYLNWYQQKPGKA |
| | | PKLLIYYTSRLESGVPSRFSGSGSGTDYTLTISSL |
| | | QPEDFATYYCQQGNTLPWTFGQGTKVEIKGGGGSG |
| | | GGGSGGGGSEVQLVESGGGLVQPGGSLRLSCAASG |
| | | YSFTGYTMNWVRQAPGKGLEWVALINPTKGVSTYN |
| | | QKFKDRFTISVDKSKNTAYLQMNSLRAEDTAVYYC |
| | | ARSGYYGDSDWYFDVWGQGTLVTVSSTSGGGGSLE |
| | | SGQVLLESNIKVLPTWSTPVQPMALIVLGGVAGLL |
| | | LFIGLGIFFCVRCRHRRRQAERMSQIKRLLSEKKT |
| | | CQCPHRFQKTCSPI |
| 488 | Amino Acid | MALPVTALLLPLALLLHAARPQVQLVQSGGGVVQP |
| | | GRSLRLSCAASGFTFSSYAMHWVRQAPGKGLEWVA |
| | | VISYDGSNKYYADSVKGRFTISRDNSKNTLYLQMN |
| | | SLRAEDTAVYYCARGRVYYYDSSGYSYWGQGTLVT |
| | | VSSGSTSGSGKPGSGEGSTKGQSVLTQPPSVSGAP |
| | | GQRVTISCTGSSSNIGAGYDVHWYQQLPGTAPKLL |
| | | IYGNSNRPSGVPDRFSGSKSGTSASLAITGLQAED |
| | | EADYYCQSYDSSLSGREVFGTGTKLTVLEQKLISE |
| | | EDLNPGGGGGSGGGGSGGGGSGGGGSGSMDIQMTQ |
| | | SPSSLSASVGDRVTITCRASQDIRNYLNWYQQKPG |
| | | KAPKLLIYYTSRLESGVPSRFSGSGSGTDYTLTIS |
| | | SLQPEDFATYYCQQGNTLPWTFGQGTKVEIKGGGG |
| | | SGGGGSGGGGSEVQLVESGGGLVQPGGSLRLSCAA |
| | | SGYSFTGYTMNWVRQAPGKGLEWVALINPTKGVST |
| | | YNQKFKDRFTISVDKSKNTAYLQMNSLRAEDTAVY |
| | | YCARSGYYGDSDWYFDVWGQGTLVTVSSTSGGGGS |
| | | LESGQVLLESNIKVLPTWSTPVQPMALIVLGGVAG |
| | | LLLFIGLGIFFCVRCRHRRRQAERMSQIKRLLSEK |
| | | KTCQCPHRFQKTCSPI |
| 489 | Amino Acid | MALPVTALLLPLALLLHAARPQVQLVESGAEVKKP |
| | | GSSVKVSCKASGGTFSSYAISWVRQAPGQGLEWMG |
| | | GIIPIFGTANYAQKFQGRVTITADESTSTAYMELS |
| | | SLRSEDTAVYYCARPLYAPRFGYGMDVWGQGTLVT |
| | | VSSGSTSGSGKPGSGEGSTKGQSVLTQPPSASGTP |
| | | GQRVTISCSGSSSNIGSNYVYWYQQLPGTAPKLLI |
| | | YRNNQRPSGVPDRFSGSKSGTSASLAISGLRSEDE |
| | | ADYYCAAWDDSLSGWVFGGGTQLTVLEQKLISEED |
| | | LNPGGGGGSGGGGSGGGGSGGGGSGSMDIQMTQSP |
| | | SSLSASVGDRVTITCRASQDIRNYLNWYQQKPGKA |
| | | PKLLIYYTSRLESGVPSRFSGSGSGTDYTLTISSL |
| | | QPEDFATYYCQQGNTLPWTFGQGTKVEIKGGGGSG |
| | | GGGSGGGGSEVQLVESGGGLVQPGGSLRLSCAASG |
| | | YSFTGYTMNWVRQAPGKGLEWVALINPTKGVSTYN |
| | | QKFKDRFTISVDKSKNTAYLQMNSLRAEDTAVYYC |
| | | ARSGYYGDSDWYFDVWGQGTLVTVSSTSGGGGSLE |
| | | SGQVLLESNIKVLPTWSTPVQPMALIVLGGVAGLL |
| | | LFIGLGIFFCVRCRHRRRQAERMSQIKRLLSEKKT |
| | | CQCPHRFQKTCSPI |
| 490 | Amino Acid | MALPVTALLLPLALLLHAARPEVQLLESGGGLVQP |
| | | GGSLRLSCAASGFTFSSYAMSWVRQAPGKGLEWVS |
| | | AISGSGGSTYYADSVKGRFTISRDNSKNTLYLQMN |
| | | SLRAEDTAVYYCAKDRGGQRGFDYWGQGTLVTVSS |
| | | GSTSGSGKPGSGEGSTKGQSVLTQPPSASGTPGQR |
| | | VTISCSGSSSNIGSNYVYWYQQLPGTAPKLLIYRN |
| | | NQRPSGVPDRFSGSKSGTSASLAISGLRSEDEADY |
| | | YCAAWDDSLSGLVFGGGTKLTVLEQKLISEEDLNP |
| | | GGGGGSGGGGSGGGGSGGGGSGSMDIQMTQSPSSL |
| | | SASVGDRVTITCRASQDIRNYLNWYQQKPGKAPKL |
| | | LIYYTSRLESGVPSRFSGSGSGTDYTLTISSLQPE |
| | | DFATYYCQQGNTLPWTFGQGTKVEIKGGGGSGGGG |
| | | SGGGGSEVQLVESGGGLVQPGGSLRLSCAASGYSF |
| | | TGYTMNWVRQAPGKGLEWVALINPTKGVSTYNQKF |
| | | KDRFTISVDKSKNTAYLQMNSLRAEDTAVYYCARS |
| | | GYYGDSDWYFDVWGQGTLVTVSSTSGGGGSLESGQ |
| | | VLLESNIKVLPTWSTPVQPMALIVLGGVAGLLLFI |
| | | GLGIFFCVRCRHRRRQAERMSQIKRLLSEKKTCQC |
| | | PHRFQKTCSPI |
| 491 | Amino Acid | MALPVTALLLPLALLLHAARPEVKLVESGGGLVQP |
| | | GGSLKLSCTTSGFTFSSYGLSWIRQTPDKRLELVA |
| | | SINRNGDNTYYTDSVKGRFTISRHDAKNTLNLQMN |
| | | SLKSEDTAMYYCTRGGFSYWGQGTLVTVSAGSTSG |
| | | SGKPGSGEGSTKGDIVLTQSPAIMSSSPGEKVTMT |
| | | CSASSSVSYMYWYQQRPGSSPRLLIYDTSKLASGV |
| | | PVRFSGSVSGTSYSLTISRMESEDAATYYCQQWSG |
| | | FPPITFGAGTKLELKEQKLISEEDLNPGGGGGSGG |
| | | GGSGGGGSGGGGSGSMDIQMTQSPSSLSASVGDRV |
| | | TITCRASQDIRNYLNWYQQKPGKAPKLLIYYTSRL |
| | | ESGVPSRFSGSGSGTDYTLTISSLQPEDFATYYCQ |
| | | QGNTLPWTFGQGTKVEIKGGGGSGGGGSGGGGSEV |
| | | QLVESGGGLVQPGGSLRLSCAASGYSFTGYTMNWV |
| | | RQAPGKGLEWVALINPTKGVSTYNQKFKDRFTISV |
| | | DKSKNTAYLQMNSLRAEDTAVYYCARSGYYGDSDW |
| | | YFDVWGQGTLVTVSSTSGGGGSLESGQVLLESNIK |
| | | VLPTWSTPVQPMALIVLGGVAGLLLFIGLGIFFCV |
| | | RCRHRRRQAERMSQIKRLLSEKKTCQCPHRFQKTC |
| | | SPI |
| 492 | Amino Acid | MALPVTALLLPLALLLHAARPEVKLVESGGGLVQP |
| | | GGSLKLSCTTSGFTFSSYGLSWIRQTPDKRLELVA |
| | | SINRNGDNTYYTDSVRGRFTISRDNAKNTLNLQMS |
| | | SLKSEDTAMYYCTRGGFSYWGQGTLVTVSAGSTSG |
| | | SGKPGSGEGSTKGDIVLTQSPATMSASPGEKVTLT |
| | | CSASPGVTYMYWYQQKPGSSPRLLIYDTSNLASGV |
| | | PLRFSGSGSGTSYSLTISRTEAEDAATYYCQQWSG |
| | | YPPITFGAGTKLELREQKLISEEDLNPGGGGGSGG |
| | | GGSGGGGSGGGGSGSMDIQMTQSPSSLSASVGDRV |
| | | TITCRASQDIRNYLNWYQQKPGKAPKLLIYYTSRL |
| | | ESGVPSRFSGSGSGTDYTLTISSLQPEDFATYYCQ |
| | | QGNTLPWTFGQGTKVEIKGGGGGGGGSGGGGSEVQ |
| | | LVESGGGLVQPGGSLRLSCAASGYSFTGYTMNWVR |
| | | QAPGKGLEWVALINPTKGVSTYNQKFKDRFTISVD |
| | | KSKNTAYLQMNSLRAEDTAVYYCARSGYYGDSDWY |
| | | FDVWGQGTLVTVSSTSGGGGSLESGQVLLESNIKV |
| | | LPTWSTPVQPMALIVLGGVAGLLLFIGLGIFFCVR |
| | | CRHRRRQAERMSQIKRLLSEKKTCQCPHRFQKTCS |
| | | PI |
| 493 | Amino Acid | MALPVTALLLPLALLLHAARPEVKLVESGGGLVQP |
| | | GGSLKLSCTTSGFTFSSYGLSWIRQTPDKRLELVA |
| | | SINRNGDNAYYIDSVKGRFTISRDNAKNALNLQMS |
| | | SLKSEDTAMYYCTRGGFSHWGQGTLVTVAAGSTSG |
| | | SGKPGSGEGSTKGQIVLTQSPAIMSASPGEKVTMT |
| | | CSASSSVSYMYWYQQKPGSSPRLLIYDTSNLASGV |
| | | PVRFSGSGSGTSYSLIISRMEAEDAATYYCQQWSG |
| | | YPPITFGAGTKLELKEQKLISEEDLNPGGGGGSGG |
| | | GGSGGGGSGGGGSGSMDIQMTQSPSSLSASVGDRV |
| | | TITCRASQDIRNYLNWYQQKPGKAPKLLIYYTSRL |
| | | ESGVPSRFSGSGSGTDYTLTISSLQPEDFATYYCQ |
| | | QGNTLPWTFGQGTKVEIKGGGGSGGGGSGGGGSEV |
| | | QLVESGGGLVQPGGSLRLSCAASGYSFTGYTMNWV |
| | | RQAPGKGLEWVALINPTKGVSTYNQKFKDRFTISV |
| | | DKSKNTAYLQMNSLRAEDTAVYYCARSGYYGDSDW |
| | | YFDVWGQGTLVTVSSTSGGGGSLESGQVLLESNIK |
| | | VLPTWSTPVQPMALIVLGGVAGLLLFIGLGIFFCV |
| | | RCRHRRRQAERMSQIKRLLSEKKTCQCPHRFQKTC |
| | | SPI |
| 494 | Amino Acid | MALPVTALLLPLALLLHAARPEVKLVESGGGLVQP |
| | | GGSLKLSCAASGFTFSSYGLSWVRQTPDKGLELVA |
| | | SINRNGGNTYYTDSVKGRFTISRDNAKNTLNLQMS |
| | | SLKSEDTAMYYCARGGFTYWGQGTLVTVSAGSTSG |
| | | SGKPGSGEGSTKGQIVLTQSPAIMSAFPGEKVTMT |
| | | CSASSSVGYMYWYQQKPGSSPRLLIYDTSNLASGV |
| | | PVRFSGSGSGTAYSLTISRMEAEDAATYYCQQWSG |
| | | YPPITFGAGTKLELKEQKLISEEDLNPGGGGGSGG |
| | | GGSGGGGSGGGGSGSMDIQMTQSPSSLSASVGDRV |
| | | TITCRASQDIRNYLNWYQQKPGKAPKLLIYYTSRL |
| | | ESGVPSRFSGSGSGTDYTLTISSLQPEDFATYYCQ |
| | | QGNTLPWTFGQGTKVEIKGGGGSGGGGSGGGGSEV |
| | | QLVESGGGLVQPGGSLRLSCAASGYSFTGYTMNWV |
| | | RQAPGKGLEWVALINPTKGVSTYNQKFKDRFTISV |
| | | DKSKNTAYLQMNSLRAEDTAVYYCARSGYYGDSDW |
| | | YFDVWGQGTLVTVSSTSGGGGSLESGQVLLESNIK |
| | | VLPTWSTPVQPMALIVLGGVAGLLLFIGLGIFFCV |
| | | RCRHRRRQAERMSQIKRLLSEKKTCQCPHRFQKTC |
| | | SPI |
| 495 | Amino Acid | MALPVTALLLPLALLLHAARPQVQLKESGGGLVRP |
| | | GGSLKLSCAASGFTFSNYGMSWIRQTPDKNLELVA |
| | | SINTSGGNTYYPDSVKGRFTISRDNARATLNLQMS |
| | | NLKSEDTAIYYCTRGGFTHWGQGTLVAVSAGSTSG |
| | | SGKPGSGEGSTKGQIVLTQSPAIMSASPGEKVTMT |
| | | CSASSSVSYMYWYQQKPGSSPRLLIYDTSNLASGV |
| | | PVRFSGSGSGTSYFLTISRMEAEDAATYYCQQWTG |
| | | YPPITFGAGTKLELREQKLISEEDLNPGGGGGSGG |
| | | GGSGGGGSGGGGSGSMDIQMTQSPSSLSASVGDRV |
| | | TITCRASQDIRNYLNWYQQKPGKAPKLLIYYTSRL |
| | | ESGVPSRFSGSGSGTDYTLTISSLQPEDFATYYCQ |
| | | QGNTLPWTFGQGTKVEIKGGGGSGGGGSGGGGSEV |
| | | QLVESGGGLVQPGGSLRLSCAASGYSFTGYTMNWV |
| | | RQAPGKGLEWVALINPTKGVSTYNQKFKDRFTISV |
| | | DKSKNTAYLQMNSLRAEDTAVYYCARSGYYGDSDW |
| | | YFDVWGQGTLVTVSSTSGGGGSLESGQVLLESNIK |
| | | VLPTWSTPVQPMALIVLGGVAGLLLFIGLGIFFCV |
| | | RCRHRRRQAERMSQIKRLLSEKKTCQCPHRFQKTC |
| | | SPI |
| 496 | Amino Acid | MALPVTALLLPLALLLHAARPQVQLKESGGGLVQP |
| | | GGSLKLSCAASGFPFSSYGLSWVRQTPDKRLELVA |
| | | TINRNGDSAYYPDSVKGRFTISRDDAKNTLYLQMS |
| | | SLKSEDTAMYYCTRGGFAYWGQGTLVTVSAGSTSG |
| | | SGKPGSGEGSTKGQIVLTQSPAIMSASPGEKVTMT |
| | | CSGSSSVGYMYWYQQKPGFSPRLLIYDTSNLASGV |
| | | PVRFSGSGSGTSYSLTISRMEAEDAATYYCQQWSG |
| | | YPPITFGAGTKLELKEQKLISEEDLNPGGGGGSGG |
| | | GGSGGGGSGGGGSGSMDIQMTQSPSSLSASVGDRV |
| | | TITCRASQDIRNYLNWYQQKPGKAPKLLIYYTSRL |
| | | ESGVPSRFSGSGSGTDYTLTISSLQPEDFATYYCQ |
| | | QGNTLPWTFGQGTKVEIKGGGGSGGGGGGGGSEVQ |
| | | LVESGGGLVQPGGSLRLSCAASGYSFTGYTMNWVR |
| | | QAPGKGLEWVALINPTKGVSTYNQKFKDRFTISVD |
| | | KSKNTAYLQMNSLRAEDTAVYYCARSGYYGDSDWY |
| | | FDVWGQGTLVTVSSTSGGGGSLESGQVLLESNIKV |
| | | LPTWSTPVQPMALIVLGGVAGLLLFIGLGIFFCVR |
| | | CRHRRRQAERMSQIKRLLSEKKTCQCPHRFQKTCS |
| | | PI |
| 497 | Amino Acid | MALPVTALLLPLALLLHAARPEVKLVESGGGLVRP |
| | | GGSLKLSCAASGFTFSNYGMSWIRQTPDKNLELVA |
| | | SINTSGGNTYYPDSVKGRFTISRDNARATLNLQMS |
| | | NLKSEDTAIYYCTRGGFTHWGQGTLVTVSAGSTSG |
| | | SGKPGSGEGSTKGDIVLTQSPAIMSASPGEKVTMT |
| | | CSASSSVAFMYWYQQKPGSSPRLLIYDTSKLASGV |
| | | PVRFSGSGSGTSYSLTISRMEAEDAATYYCQQWSG |
| | | YPPITFGAGTKLELKEQKLISEEDLNPGGGGGSGG |
| | | GGSGGGGSGGGGSGSMDIQMTQSPSSLSASVGDRV |
| | | TITCRASQDIRNYLNWYQQKPGKAPKLLIYYTSRL |
| | | ESGVPSRFSGSGSGTDYTLTISSLQPEDFATYYCQ |
| | | QGNTLPWTFGQGTKVEIKGGGGSGGGGSGGGGSEV |
| | | QLVESGGGLVQPGGSLRLSCAASGYSFTGYTMNWV |
| | | RQAPGKGLEWVALINPTKGVSTYNQKFKDRFTISV |
| | | DKSKNTAYLQMNSLRAE |
| | | DTAVYYCARSGYYGDSDWYFDVWGQGTLVTVSSTS |
| | | GGGGSLESGQVLLESNIKVLPTWSTPVQPMALIVL |
| | | GGVAGLLLFIGLGIFFCVRCRHRRRQAERMSQIKR |
| | | LLSEKKTCQCPHRFQKTCSPI |
| 498 | Amino Acid | MALPVTALLLPLALLLHAARPQVQLKESGGGLVQP |
| | | GGSLKLSCTTSGFTFSSYGLSWIRQTPDKRLELVA |
| | | SINRNGDNTYYTDSVRGRFTISRDNAKSTLNLQMS |
| | | SLKSEDTAMYYCTRGGFSYWGQGTLVTVSAGSTSG |
| | | SGKPGSGEGSTKGQIVLTQSPPLMSASPGEKVTMT |
| | | CSASSSVGYMYWFQQRPGSSPRLLIYDTYNLASGV |
| | | PVRFSGSGSGTSYSLTISRLEAEDAATYYCQQWSG |
| | | YPPITFGAGTKLELREQKLISEEDLNPGGGGGSGG |
| | | GGSGGGGSGGGGSGSMDIQMTQSPSSLSASVGDRV |
| | | TITCRASQDIRNYLNWYQQKPGKAPKLLIYYTSRL |
| | | ESGVPSRFSGSGSGTDYTLTISSLQPEDFATYYCQ |
| | | QGNTLPWTFGQGTKVEIKGGGGSGGGGSGGGGSEV |
| | | QLVESGGGLVQPGGSLRLSCAASGYSFTGYTMNWV |
| | | RQAPGKGLEWVALINPTKGVSTYNQKFKDRFTISV |
| | | DKSKNTAYLQMNSLRAEDTAVYYCARSGYYGDSDW |
| | | YFDVWGQGTLVTVSSTSGGGGSLESGQVLLESNIK |
| | | VLPTWSTPVQPMALIVLGGVAGLLLFIGLGIFFCV |
| | | RCRHRRRQAERMSQIKRLLSEKKTCQCPHRFQKTC |
| | | SPI |
| 499 | Amino Acid | MALPVTALLLPLALLLHAARPEVKLVESGGGLVQP |
| | | GGSLKLSCAASGFTFSSYGLSWVRQTPDKRLELVA |
| | | SVNRNGGNTYYTDSVKGRFTISRDNAKNTLNLQMS |
| | | SLKSEDTAMYYCARGGFTYWGQGTLVTVSAGSTSG |
| | | SGKPGSGEGSTKGQIVLTQSPAIMSASPGEKVTMT |
| | | CSASSSVGYMYWYQQKPGSSPRLLIYDTSHLASGV |
| | | PVRFSGSGSGTSYSLTISRMEAEDAATYYCQQWSG |
| | | YPPITFGAGTKLELKEQKLISEEDLNPGGGGGSGG |
| | | GGSGGGGSGGGGSGSMDIQMTQSPSSLSASVGDRV |
| | | TITCRASQDIRNYLNWYQQKPGKAPKLLIYYTSRL |
| | | ESGVPSRFSGSGSGTDYTLTISSLQPEDFATYYCQ |
| | | QGNTLPWTFGQGTKVEIKGGGGGGGGSGGGGSEVQ |
| | | LVESGGGLVQPGGSLRLSCAASGYSFTGYTMNWVR |
| | | QAPGKGLEWVALINPTKGVSTYNQKFKDRFTISVD |
| | | KSKNTAYLQMNSLRAEDTAVYYCARSGYYGDSDWY |
| | | FDVWGQGTLVTVSSTSGGGGSLESGQVLLESNIKV |
| | | LPTWSTPVQPMALIVLGGVAGLLLFIGLGIFFCVR |
| | | CRHRRRQAERMSQIKRLLSEKKTCQCPHRFQKTCS |
| | | PI |
| 500 | Amino Acid | MALPVTALLLPLALLLHAARPEVKLVESGGGLVQP |
| | | GGSLKLSCAASGFPFSSYGLSWVRQTPDKRLELVA |
| | | TINRNGDSAYYPDSVKGRFTISRDDAKNTLYLQMS |
| | | SLKSEDTAMYYCTRGGFAYWGQGTLVTVSAGSTSG |
| | | SGKPGSGEGSTKGQIVLTQSPVIMSASPGEKVTMT |
| | | CSASSSVGYMYWYQQRPGSSPRLLIYDTSNLASGA |
| | | PVRFSGSGSGTSYSLTISRMEAEDAATYYCQQWSG |
| | | YPPITFGAGTKLELKEQKLISEEDLNPGGGGGSGG |
| | | GGSGGGGSGGGGSGSMDIQMTQSPSSLSASVGDRV |
| | | TITCRASQDIRNYLNWYQQKPGKAPKLLIYYTSRL |
| | | ESGVPSRFSGSGSGTDYTLTISSLQPEDFATYYCQ |
| | | QGNTLPWTFGQGTKVEIKGGGGSGGGGSGGGGSEV |
| | | QLVESGGGLVQPGGSLRLSCAASGYSFTGYTMNWV |
| | | RQAPGKGLEWVALINPTKGVSTYNQKFKDRFTISV |
| | | DKSKNTAYLQMNSLRAEDTAVYYCARSGYYGDSDW |
| | | YFDVWGQGTLVTVSSTSGGGGSLESGQVLLESNIK |
| | | VLPTWSTPVQPMALIVLGGVAGLLLFIGLGIFFCV |
| | | RCRHRRRQAERMSQIKRLLSEKKTCQCPHRFQKTC |
| | | SPI |
| 501 | Amino Acid | MALPVTALLLPLALLLHAARPEVKLVESGGGLVQP |
| | | GGSLKLSCTTSGFTFSSYGLSWIRQTPDKRLELVA |
| | | SINRNGDNTYYTDSVKGRFTISRDNAKNTLNLQMS |
| | | SLKSEDTAMYYCTRGGFSYWGQGTLVTVSAGSTSG |
| | | SGKPGSGEGSTKGQIVLTQSPAIMSASPGEKVTMT |
| | | CSASSSVSYMYWYQQKPGSSPRLLIYDTSNLASGV |
| | | PVRFSGSGSGTSYSLTISRMEAEDAATYYCQQWTG |
| | | YPPITFGAGTKLELKEQKLISEEDLNPGGGGGSGG |
| | | GGSGGGGSGGGGSGSMDIQMTQSPSSLSASVGDRV |
| | | TITCRASQDIRNYLNWYQQKPGKAPKLLIYYTSRL |
| | | ESGVPSRFSGSGSGTDYTLTISSLQPEDFATYYCQ |
| | | QGNTLPWTFGQGTKVEIKGGGGSGGGGSGGGGSEV |
| | | QLVESGGGLVQPGGSLRLSCAASGYSFTGYTMNWV |
| | | RQAPGKGLEWVALINPTKGVSTYNQKFKDRFTISV |
| | | DKSKNTAYLQMNSLRAEDTAVYYCARSGYYGDSDW |
| | | YFDVWGQGTLVTVSSTSGGGGSLESGQVLLESNIK |
| | | VLPTWSTPVQPMALIVLGGVAGLLLFIGLGIFFCV |
| | | RCRHRRRQAERMSQIKRLLSEKKTCQCPHRFQKTC |
| | | SPI |
| 502 | Amino Acid | MALPVTALLLPLALLLHAARPEVKLVESGGVLVQP |
| | | GGSLKLSCAASGFTFSSYGMSWVRQTPDKRLELVA |
| | | SINKNGGSTYYPDSVKGRFTISRDNAKTTVYLQMS |
| | | SLKSEDTAMYYCTRGGFAYWGQGTLVTVSAGSTSG |
| | | SGKPGSGEGSTKGQIVLTQSPAIMSASPGEKVTLT |
| | | CSASSSVGYMYWYQQRPGSSPRLLIYDTSNLPSGV |
| | | PVRFSGSGSGTSYSLTISRMEAEDAATYYCQQWSG |
| | | YPPITFGAGTKLELKEQKLISEEDLNPGGGGGSGG |
| | | GGSGGGGSGGGGSGSMDIQMTQSPSSLSASVGDRV |
| | | TITCRASQDIRNYLNWYQQKPGKAPKLLIYYTSRL |
| | | ESGVPSRFSGSGSGTDYTLTISSLQPEDFATYYCQ |
| | | QGNTLPWTFGQGTKVEIKGGGGSGGGGSGGGGSEV |
| | | QLVESGGGLVQPGGSLRLSCAASGYSFTGYTMNWV |
| | | RQAPGKGLEWVALINPTKGVSTYNQKFKDRFTISV |
| | | DKSKNTAYLQMNSLRAEDTAVYYCARSGYYGDSDW |
| | | YFDVWGQGTLVTVSSTSGGGGSLESGQVLLESNIK |
| | | VLPTWSTPVQPMALIVLGGVAGLLLFIGLGIFFCV |
| | | RCRHRRRQAERMSQIKRLLSEKKTCQCPHRFQKTC |
| | | SPI |
| 503 | Amino Acid | MALPVTALLLPLALLLHAARPQLQLQESGGGLVQA |
| | | GGSLRLSCAASGRTGSSYAMGWFRQAPGKEREFVA |
| | | AITWSGGITAYADSVKGRFTISRDNAKNTVYLQMN |
| | | SLKPEDTAVYCCAAGVTGSPSFDSWGQGTQVTVSS |
| | | EQKLISEEDLNPGGGGGSGGGGSGGGGSGGGGSGS |
| | | MDIQMTQSPSSLSASVGDRVTITCRASQDIRNYLN |
| | | WYQQKPGKAPKLLIYYTSRLESGVPSRFSGSGSGT |
| | | DYTLTISS |
| | | LQPEDFATYYCQQGNTLPWTFGQGTKVEIKGGGGS |
| | | GGGGSGGGGSEVQLVESGGGLVQPGGSLRLSCAAS |
| | | GYSFTGYTMNWVRQAPGKGLEWVALINPTKGVSTY |
| | | NQKFKDRFTISVDKSKNTAYLQMNSLRAEDTAVYY |
| | | CARSGYYGDSDWYFDVWGQGTLVTVSSTSGGGGSL |
| | | ESGQVLLESNIKVLPTWSTPVQPMALIVLGGVAGL |
| | | LLFIGLGIFFCVRCRHRRRQAERMSQIKRLLSEKK |
| | | TCQCPHRFQKTCSPI |
| 504 | Amino Acid | MALPVTALLLPLALLLHAARPQVQLQESGGGLVQA |
| | | GGSLRLSCAASGRTFSSYAMGWFRQAPGKEREFVA |
| | | AISGSGGSIYYGDSVKGRFTISRDNAKNTMYLQMN |
| | | RLKPEDTAVYYCAAGPLGSPDFDSWGQGTQVTVSS |
| | | EQKLISEEDLNPGGGGGSGGGGSGGGGSGGGGSGS |
| | | MDIQMTQSPSSLSASVGDRVTITCRASQDIRNYLN |
| | | WYQQKPGKAPKLLIYYTSRLESGVPSRFSGSGSGT |
| | | DYTLTISSLQPEDFATYYCQQGNTLPWTFGQGTKV |
| | | EIKGGGGSGGGGSGGGGSEVQLVESGGGLVQPGGS |
| | | LRLSCAASGYSFTGYTMNWVRQAPGKGLEWVALIN |
| | | PTKGVSTYNQKFKDRFTISVDKSKNTAYLQMNSLR |
| | | AEDTAVYYCARSGYYGDSDWYFDVWGQGTLVTVSS |
| | | TSGGGGSLESGQVLLESNIKVLPTWSTPVQPMALI |
| | | VLGGVAGLLLFIGLGIFFCVRCRHRRRQAERMSQI |
| | | KRLLSEKKTCQCPHRFQKTCSPI |
| 505 | Amino Acid | MALPVTALLLPLALLLHAARPEVQVVESGGGLVQP |
| | | GGSLRLSCVASGRTFSSYAMGWFRQAPGKEREFVA |
| | | AISGSGGSIYYGDSVKGRFTISRDNAKNTMYLQMN |
| | | RLKPEDTAVYYCAAGPLGSPDFDSWGQGTQVTVSS |
| | | EQKLISEEDLNPGGGGGSGGGGSGGGGSGGGGSGS |
| | | MDIQMTQSPSSLSASVGDRVTITCRASQDIRNYLN |
| | | WYQQKPGKAPKLLIYYTSRLESGVPSRFSGSGSGT |
| | | DYTLTISSLQPEDFATYYCQQGNTLPWTFGQGTKV |
| | | EIKGGGGSGGGGSGGGGSEVQLVESGGGLVQPGGS |
| | | LRLSCAASGYSFTGYTMNWVRQAPGKGLEWVALIN |
| | | PTKGVSTYNQKFKDRFTISVDKSKNTAYLQMNSLR |
| | | AEDTAVYYCARSGYYGDSDWYFDVWGQGTLVTVSS |
| | | TSGGGGSLESGQVLLESNIKVLPTWSTPVQPMALI |
| | | VLGGVAGLLLFIGLGIFFCVRCRHRRRQAERMSQI |
| | | KRLLSEKKTCQCPHRFQKTCSPI |
| 506 | Amino Acid | MALPVTALLLPLALLLHAARPKVQLVESGGGLVQA |
| | | GGSLRLSCAASGRTGSSYAMGWFRQAPGKEREFVA |
| | | AITWSGGITAYADSVKGRFTISRDNAKNTVYLQMN |
| | | SLKPEDTAVYCCAAGVTGSPSFDSWGQGTQVTVSS |
| | | EQKLISEEDLNPGGGGGSGGGGSGGGGSGGGGSGS |
| | | MDIQMTQSPSSLSASVGDRVTITCRASQDIRNYLN |
| | | WYQQKPGKAPKLLIYYTSRLESGVPSRFSGSGSGT |
| | | DYTLTISSLQPEDFATYYCQQGNTLPWTFGQGTKV |
| | | EIKGGGGSGGGGSGGGGSEVQLVESGGGLVQPGGS |
| | | LRLSCAASGYSFTGYTMNWVRQAPGKGLEWVALIN |
| | | PTKGVSTYNQKFKDRFTISVDKSKNTAYLQMNSLR |
| | | AEDTAVYYCARSGYYGDSDWYFDVWGQGTLVTVSS |
| | | TSGGGGSLESGQVLLESNIKVLPTWSTPVQPMALI |
| | | VLGGVAGLLLFIGLGIFFCVRCRHRRRQAERMSQI |
| | | KRLLSEKKTCQCPHRFQKTCSPI |
| 507 | Amino Acid | MALPVTALLLPLALLLHAARPEVQLVESGGGLVQA |
| | | GGSLRLSCAASGRTFSSYAMGWFRQAPGKEREFVA |
| | | AISGSGGVTFYAHSVKGRFTISRDNAKNTVYLQMN |
| | | SLKPEDTAVYSCAGGAHGSPDFGSWGQGTQVTVSS |
| | | EQKLISEEDLNPGGGGGSGGGGSGGGGSGGGGSGS |
| | | MDIQMTQSPSSLSASVGDRVTITCRASQDIRNYLN |
| | | WYQQKPGKAPKLLIYYTSRLESGVPSRFSGSGSGT |
| | | DYTLTISSLQPEDFATYYCQQGNTLPWTFGQGTKV |
| | | EIKGGGGSGGGGSGGGGSEVQLVESGGGLVQPGGS |
| | | LRLSCAASGYSFTGYTMNWVRQAPGKGLEWVALIN |
| | | PTKGVSTYNQKFKDRFTISVDKSKNTAYLQMNSLR |
| | | AEDTAVYYCARSGYYGDSDWYFDVWGQGTLVTVSS |
| | | TSGGGGSLESGQVLLESNIKVLPTWSTPVQPMALI |
| | | VLGGVAGLLLFIGLGIFFCVRCRHRRRQAERMSQI |
| | | KRLLSEKKTCQCPHRFQKTCSPI |
| 508 | Amino Acid | MALPVTALLLPLALLLHAARPQVQLVESGGGLVQP |
| | | GGSLRLSCAVSRNIASLYRVDWYRQAPGKQRELVA |
| | | GRTSGGTTTYLDAVEGRFTISRDNVKDTVYLQMNS |
| | | LTPEDTAVYYCHAHDHWRDSWGQGTQVTVSSEQKL |
| | | ISEEDLNPGGGGGSGGGGSGGGGSGGGGSGSMDIQ |
| | | MTQSPSSLSASVGDRVTITCRASQDIRNYLNWYQQ |
| | | KPGKAPKLLIYYTSRLESGVPSRFSGSGSGTDYTL |
| | | TISSLQPEDFATYYCQQGNTLPWTFGQGTKVEIKG |
| | | GGGSGGGGSGGGGSEVQLVESGGGLVQPGGSLRLS |
| | | CAASGYSFTGYTMNWVRQAPGKGLEWVALINPTKG |
| | | VSTYNQKFKDRFTISVDKSKNTAYLQMNSLRAEDT |
| | | AVYYCARSGYYGDSDWYFDVWGQGTLVTVSSTSGG |
| | | GGSLESGQVLLESNIKVLPTWSTPVQPMALIVLGG |
| | | VAGLLLFIGLGIFFCVRCRHRRRQAERMSQIKRLL |
| | | SEKKTCQCPHRFQKTCSPI |
| 509 | Amino Acid | MALPVTALLLPLALLLHAARPQVQLVESGGDLVQP |
| | | GGSLRLSCAASGSIGSIYAMGWYRQAPGRQRELVA |
| | | TTTSGGTTNYADSVKGRFTIAGDNAKNTVFLQMNS |
| | | LRPEDTAVYYCKIQTHWYVYWGQGTQVTVSSEQKL |
| | | ISEEDLNPGGGGGSGGGGSGGGGSGGGGSGSMDIQ |
| | | MTQSPSSLSASVGDRVTITCRASQDIRNYLNWYQQ |
| | | KPGKAPKLLIYYTSRLESGVPSRFSGSGSGTDYTL |
| | | TISSLQPEDFATYYCQQGNTLPWTFGQGTKVEIKG |
| | | GGGSGGGGSGGGGSEVQLVESGGGLVQPGGSLRLS |
| | | CAASGYSFTGYTMNWVRQAPGKGLEWVALINPTKG |
| | | VSTYNQKFKDRFTISVDKSKNTAYLQMNSLRAEDT |
| | | AVYYCARSGYYGDSDWYFDVWGQGTLVTVSSTSGG |
| | | GGSLESGQVLLESNIKVLPTWSTPVQPMALIVLGG |
| | | VAGLLLFIGLGIFFCVRCRHRRRQAERMSQIKRLL |
| | | SEKKTCQCPHRFQKTCSPI |
| 510 | Amino Acid | MALPVTALLLPLALLLHAARPEVQLVESGGGLVQP |
| | | GGSLRLSCAASRNIFSLYRVDWYRQAPGKQRELVA |
| | | GSTSGGTTTYADAVKGRFTISTDNVKDTVYLQMNS |
| | | LTPEDTAVYYCHAHDHWRDSWGQGTQVTVSSEQKL |
| | | ISEEDLNPGGGGGSGGGGSGGGGSGGGGSGSMDIQ |
| | | MTQSPSSLSASVGDRVTITCRASQDIRNYLNWYQQ |
| | | KPGKAPKLLIYYTSRLESGVPSRFSGSGSGTDYTL |
| | | TISSLQPEDFATYYCQQGNTLPWTFGQGTKVEIKG |
| | | GGGSGGGGSGGGGSEVQLVESGGGLVQPGGSLRLS |
| | | CAASGYSFTGYTMNWVRQAPGKGLEWVALINPTKG |
| | | VSTYNQKFKDRFTISVDKSKNTAYLQMNSLRAEDT |
| | | AVYYCARSGYYGDSDWYFDVWGQGTLVTVSSTSGG |
| | | GGSLESGQVLLESNIKVLPTWSTPVQPMALIVLGG |
| | | VAGLLLFIGLGIFFCVRCRHRRRQAERMSQIKRLL |
| | | SEKKTCQCPHRFQKTCSPI |
| 511 | Amino Acid | MALPVTALLLPLALLLHAARPQVQLVESGGGWVHP |
| | | GGSLRLSCAASRNIFSMYRVDWYRQAPGKQRELVA |
| | | GITSGGTTSYADAVKGRFTISTDNVKDTVYLQMNS |
| | | VTPEDTAVYYCHAHDHWRDSWGQGTQVTVSSEQKL |
| | | ISEEDLNPGGGGGSGGGGSGGGGSGGGGSGSMDIQ |
| | | MTQSPSSLSASVGDRVTITCRASQDIRNYLNWYQQ |
| | | KPGKAPKLLIYYTSRLESGVPSRFSGSGSGTDYTL |
| | | TISSLQPEDFATYYCQQGNTLPWTFGQGTKVEIKG |
| | | GGGSGGGGSGGGGSEVQLVESGGGLVQPGGSLRLS |
| | | CAASGYSFTGYTMNWVRQAPGKGLEWVALINPTKG |
| | | VSTYNQKFKDRFTISVDKSKNTAYLQMNSLRAEDT |
| | | AVYYCARSGYYGDSDWYFDVWGQGTLVTVSSTSGG |
| | | GGSLESGQVLLESNIKVLPTWSTPVQPMALIVLGG |
| | | VAGLLLFIGLGIFFCVRCRHRRRQAERMSQIKRLL |
| | | SEKKTCQCPHRFQKTCSPI |
| 512 | Amino Acid | MALPVTALLLPLALLLHAARPEVQVQESGGDLVQP |
| | | GGSLRLSCAASGSIGSIYRKGWYRQAPGSQRELVA |
| | | TITSAGTTNYADSVKGRFTISRDNAKNTVYLQMNS |
| | | LRPEDTAVYYCNFQTHWYVYWGQGTQVTVSSEQKL |
| | | ISEEDLNPGGGGGSGGGGSGGGGSGGGGSGSMDIQ |
| | | MTQSPSSLSASVGDRVTITCRASQDIRNYLNWYQQ |
| | | KPGKAPKLLIYYTSRLESGVPSRFSGSGSGTDYTL |
| | | TISSLQPEDFATYYCQQGNTLPWTFGQGTKVEIKG |
| | | GGGSGGGGSGGGGSEVQLVESGGGLVQPGGSLRLS |
| | | CAASGYSFTGYTMNWVRQAPGKGLEWVALINPTKG |
| | | VSTYNQKFKDRFTISVDKSKNTAYLQMNSLRAEDT |
| | | AVYYCARSGYYGDSDWYFDVWGQGTLVTVSSTSGG |
| | | GGSLESGQVLLESNIKVLPTWSTPVQPMALIVLGG |
| | | VAGLLLFIGLGIFFCVRCRHRRRQAERMSQIKRLL |
| | | SEKKTCQCPHRFQKTCSPI |
| 513 | Amino Acid | MALPVTALLLPLALLLHAARPEVRLVESGGGLVQP |
| | | GGSLRLSCAVSKNIFSIYRVDWYHQAPGKQRELVA |
| | | GWTSGGSTSYADAVKGRFTISTDNVKDTVYLQMNS |
| | | LTPEDTAVYYCHAHDHWRDYWGQGTQVTVSSEQKL |
| | | ISEEDLNPGGGGGSGGGGSGGGGSGGGGSGSMDIQ |
| | | MTQSPSSLSASVGDRVTITCRASQDIRNYLNWYQQ |
| | | KPGKAPKLLIYYTSRLESGVPSRFSGSGSGTDYTL |
| | | TISSLQPEDFATYYCQQGNTLPWTFGQGTKVEIKG |
| | | GGGSGGGGSGGGGSEVQLVESGGGLVQPGGSLRLS |
| | | CAASGYSFTGYTMNWVRQAPGKGLEWVALINPTKG |
| | | VSTYNQKFKDRFTISVDKSKNTAYLQMNSLRAEDT |
| | | AVYYCARSGYYGDSDWYFDVWGQGTLVTVSSTSGG |
| | | GGSLESGQVLLESNIKVLPTWSTPVQPMALIVLGG |
| | | VAGLLLFIGLGIFFCVRCRHRRRQAERMSQIKRLL |
| | | SEKKTCQCPHRFQKTCSPI |
| 514 | Amino Acid | QVQLQESGGGLVQPGGSLRLSCAASGIIFSINTMA |
| | | WYRQGPGKQRDLVALISSGGNTSYADSVNGRFTIS |
| | | RDNAKNTVYLQMNGLKPEDTAVYYCNSAGRSYSGS |
| | | YGAYWGQGTQVTVSS |
| 515 | Amino Acid | EVQLVESGGGLVQPGGSLRLSCAASRSIFVIAFMD |
| | | WYRQAPGKQREFVAGISSSGATSYASSVKGRFTVS |
| | | RDTAKNTMYLQMNNLLPEDSAVYYCKADTATTTDW |
| | | GQGTQVTVSS |
| 516 | Amino Acid | QVQLQESGGGLVQPGGSLRLSCAASRSIFGIAFMD |
| | | WYRQAPGKQREFVAGISHSGATSYADSVKGRFTVS |
| | | RDNAKNTMYLQMNNLLPEDSAVYYCKADTATNTDW |
| | | GQGTQVTVSS |
| 517 | Amino Acid | QLQLVESGGGLVQAGGSLRLSCAVSGNIWVFTVMA |
| | | WYRQVPGKQRELVAASTNGGSTNYADSVKGRFTIS |
| | | RDNVKNTVYLQMNSLKPEDTAVYYCNRQRTVIGMN |
| | | PLAPWGQGTQVTVSS |
| 518 | Amino Acid | QVQLVESGGGLVQPGGSLRLSCATSGIIFHIYTMG |
| | | WYRGAPGKQRELVARITSGGDTNYADSVKGRFTIS |
| | | RDNVKNTMYLQMNSLKPEDTAVYYCNRFPGATFSW |
| | | GQGTQVTVSS |
| 519 | Amino Acid | EVQLVESGGGLVQPGGSLRLSCAASGIIFSINTMA |
| | | WYRQGPGKERDLVAVIKGDGSTSYADSVNGRFTIS |
| | | RDNAKNTVYLRMNGLKPEDTAVYYCNSAGRSYSGV |
| | | YGAYWGQGTQVTVSS |
| 520 | Amino Acid | EVQLQESGGGLVQPGGSLKLSCAASGSIFSIGAMR |
| | | WYRQVPGNERELVAGITNGGNTNYADSVKARFTIS |
| | | RDNAKNTVYLQMNSLKPEDTTVYFCNADVQNSGYV |
| | | WGNYWGQGTQVTVSS |
| 521 | Amino Acid | EVQLVESGGGLVQPGGSLRLSCAASRSIFVIAFMD |
| | | WYRQAPGKQREFVAGISSSGATSYADSVKGRFTVS |
| | | RDTAKNTMYLQMNNLLPEDSAVYYCKADTATNTDW |
| | | GQGTQVTVSS |
| 522 | Amino Acid | GIIFSINTMA |
| 523 | Amino Acid | LISSGGNTSYADS |
| 524 | Amino Acid | NSAGRSYSGSYGAY |
| 525 | Amino Acid | RSIFVIAFMD |
| 526 | Amino Acid | GISSSGATSYASS |
| 527 | Amino Acid | KADTATTTD |
| 528 | Amino Acid | RSIFGIAFMD |
| 529 | Amino Acid | GISHSGATSYADS |
| 530 | Amino Acid | KADTATNTD |
| 531 | Amino Acid | GNIWVFTVMA |
| 532 | Amino Acid | ASTNGGSTNYADS |
| 533 | Amino Acid | NRQRTVIGMNPLAP |
| 534 | Amino Acid | GIIFHIYTMG |
| 535 | Amino Acid | RITSGGDTNYADS |
| 536 | Amino Acid | NRFPGATFS |
| 537 | Amino Acid | GIIFSINTMA |
| 538 | Amino Acid | VIKGDGSTSYADS |
| 539 | Amino Acid | NSAGRSYSGVYGAY |
| 540 | Amino Acid | GSIFSIGAMR |
| 541 | Amino Acid | GITNGGNTNYADS |
| 542 | Amino Acid | NADVQNSGYVWGNY |
| 543 | Amino Acid | RSIFVIAFMD |
| 544 | Amino Acid | GISSSGATSYADS |
| 545 | Amino Acid | KADTATNTD |
| 546 | Amino Acid | MALPVTALLLPLALLLHAARPQVQLQESGGGLVQP |
| | | GGSLRLSCAASGIIFSINTMAWYRQGPGKQRDLVA |
| | | LISSGGNTSYADSVNGRFTISRDNAKNTVYLQMNG |
| | | LKPEDTAVYYCNSAGRSYSGSYGAYWGQGTQVTVS |
| | | SEQKLISEEDLNPGGGGGSGGGGSGGGGSGGGGSG |
| | | SMDIQMTQSPSSLSASVGDRVTITCRASQDIRNYL |
| | | NWYQQKPGKAPKLLIYYTSRLESGVPSRFSGSGSG |
| | | TDYTLTISSLQPEDFATYYCQQGNTLPWTFGQGTK |
| | | VEIKGGGGSGGGGSGGGGSEVQLVESGGGLVQPGG |
| | | SLRLSCAASGYSFTGYTMNWVRQAPGKGLEWVALI |
| | | NPTKGVSTYNQKFKDRFTISVDKSKNTAYLQMNSL |
| | | RAEDTAVYYCARSGYYGDSDWYFDVWGQGTLVTVS |
| | | STSGGGGSLESGQVLLESNIKVLPTWSTPVQPMAL |
| | | IVLGGVAGLLLFIGLGIFFCVRCRHRRRQAERMSQ |
| | | IKRLLSEKKTCQCPHRFQKTCSPI |
| 547 | Amino Acid | MALPVTALLLPLALLLHAARPEVQLVESGGGLVQP |
| | | GGSLRLSCAASRSIFVIAFMDWYRQAPGKQREFVA |
| | | GISSSGATSYASSVKGRFTVSRDTAKNTMYLQMNN |
| | | LLPEDSAVYYCKADTATTTDWGQGTQVTVSSEQKL |
| | | ISEEDLNPGGGGGSGGGGSGGGGSGGGGSGSMDIQ |
| | | MTQSPSSLSASVGDRVTITCRASQDIRNYLNWYQQ |
| | | KPGKAPKLLIYYTSRLESGVPSRFSGSGSGTDYTL |
| | | TISSLQPEDFATYYCQQGNTLPWTFGQGTKVEIKG |
| | | GGGSGGGGSGGGGSEVQLVESGGGLVQPGGSLRLS |
| | | CAASGYSFTGYTMNWVRQAPGKGLEWVALINPTKG |
| | | VSTYNQKFKDRFTISVDKSKNTAYLQMNSLRAEDT |
| | | AVYYCARSGYYGDSDWYFDVWGQGTLVTVSSTSGG |
| | | GGSLESGQVLLESNIKVLPTWSTPVQPMALIVLGG |
| | | VAGLLLFIGLGIFFCVRCRHRRRQAERMSQIKRLL |
| | | SEKKTCQCPHRFQKTCSPI |
| 548 | Amino Acid | MALPVTALLLPLALLLHAARPQVQLQESGGGLVQP |
| | | GGSLRLSCAASRSIFGIAFMDWYRQAPGKQREFVA |
| | | GISHSGATSYADSVKGRFTVSRDNAKNTMYLQMNN |
| | | LLPEDSAVYYCKADTATNTDWGQGTQVTVSSEQKL |
| | | ISEEDLNPGGGGGSGGGGSGGGGSGGGGSGSMDIQ |
| | | MTQSPSSLSASVGDRVTITCRASQDIRNYLNWYQQ |
| | | KPGKAPKLLIYYTSRLESGVPSRFSGSGSGTDYTL |
| | | TISSLQPEDFATYYCQQGNTLPWTFGQGTKVEIKG |
| | | GGGSGGGGSGGGGSEVQLVESGGGLVQPGGSLRLS |
| | | CAASGYSFTGYTMNWVRQAPGKGLEWVALINPTKG |
| | | VSTYNQKFKDRFTISVDKSKNTAYLQMNSLRAEDT |
| | | AVYYCARSGYYGDSDWYFDVWGQGTLVTVSSTSGG |
| | | GGSLESGQVLLESNIKVLPTWSTPVQPMALIVLGG |
| | | VAGLLLFIGLGIFFCVRCRHRRRQAERMSQIKRLL |
| | | SEKKTCQCPHRFQKTCSPI |
| 549 | Amino Acid | MALPVTALLLPLALLLHAARPQLQLVESGGGLVQA |
| | | GGSLRLSCAVSGNIWVFTVMAWYRQVPGKQRELVA |
| | | ASTNGGSTNYADSVKGRFTISRDNVKNTVYLQMNS |
| | | LKPEDTAVYYCNRQRTVIGMNPLAPWGQGTQVTVS |
| | | SEQKLISEEDLNPGGGGGSGGGGSGGGGSGGGGSG |
| | | SMDIQMTQSPSSLSASVGDRVTITCRASQDIRNYL |
| | | NWYQQKPGKAPKLLIYYTSRLESGVPSRFSGSGSG |
| | | TDYTLTISSLQPEDFATYYCQQGNTLPWTFGQGTK |
| | | VEIKGGGGSGGGGSGGGGSEVQLVESGGGLVQPGG |
| | | SLRLSCAASGYSFTGYTMNWVRQAPGKGLEWVALI |
| | | NPTKGVSTYNQKFKDRFTISVDKSKNTAYLQMNSL |
| | | RAEDTAVYYCARSGYYGDSDWYFDVWGQGTLVTVS |
| | | STSGGGGSLESGQVLLESNIKVLPTWSTPVQPMAL |
| | | IVLGGVAGLLLFIGLGIFFCVRCRHRRRQAERMSQ |
| | | IKRLLSEKKTCQCPHRFQKTCSPI |
| 550 | Amino Acid | MALPVTALLLPLALLLHAARPQVQLVESGGGLVQP |
| | | GGSLRLSCATSGIIFHIYTMGWYRGAPGKQRELVA |
| | | RITSGGDTNYADSVKGRFTISRDNVKNTMYLQMNS |
| | | LKPEDTAVYYCNRFPGATFSWGQGTQVTVSSEQKL |
| | | ISEEDLNPGGGGGSGGGGSGGGGSGGGGSGSMDIQ |
| | | MTQSPSSLSASVGDRVTITCRASQDIRNYLNWYQQ |
| | | KPGKAPKLLIYYTSRLESGVPSRFSGSGSGTDYTL |
| | | TISSLQPEDFATYYCQQGNTLPWTFGQGTKVEIKG |
| | | GGGSGGGGSGGGGSEVQLVESGGGLVQPGGSLRLS |
| | | CAASGYSFTGYTMNWVRQAPGKGLEWVALINPTKG |
| | | VSTYNQKFKDRFTISVDKSKNTAYLQMNSLRAEDT |
| | | AVYYCARSGYYGDSDWYFDVWGQGTLVTVSSTSGG |
| | | GGSLESGQVLLESNIKVLPTWSTPVQPMALIVLGG |
| | | VAGLLLFIGLGIFFCVRCRHRRRQAERMSQIKRLL |
| | | SEKKTCQCPHRFQKTCSPI |
| 551 | Amino Acid | MALPVTALLLPLALLLHAARPEVQLVESGGGLVQP |
| | | GGSLRLSCAASGIIFSINTMAWYRQGPGKERDLVA |
| | | VIKGDGSTSYADSVNGRFTISRDNAKNTVYLRMNG |
| | | LKPEDTAVYYCNSAGRSYSGVYGAYWGQGTQVTVS |
| | | SEQKLISEEDLNPGGGGGSGGGGSGGGGSGGGGSG |
| | | SMDIQMTQSPSSLSASVGDRVTITCRASQDIRNYL |
| | | NWYQQKPGKAPKLLIYYTSRLESGVPSRFSGSGSG |
| | | TDYTLTISSLQPEDFATYYCQQGNTLPWTFGQGTK |
| | | VEIKGGGGSGGGGSGGGGSEVQLVESGGGLVQPGG |
| | | SLRLSCAASGYSFTGYTMNWVRQAPGKGLEWVALI |
| | | NPTKGVSTYNQKFKDRFTISVDKSKNTAYLQMNSL |
| | | RAEDTAVYYCARSGYYGDSDWYFDVWGQGTLVTVS |
| | | STSGGGGSLESGQVLLESNIKVLPTWSTPVQPMAL |
| | | IVLGGVAGLLLFIGLGIFFCVRCRHRRRQAERMSQ |
| | | IKRLLSEKKTCQCPHRFQKTCSPI |
| 552 | Amino Acid | MALPVTALLLPLALLLHAARPEVQLQESGGGLVQP |
| | | GGSLKLSCAASGSIFSIGAMRWYRQVPGNERELVA |
| | | GITNGGNTNYADSVKARFTISRDNAKNTVYLQMNS |
| | | LKPEDTTVYFCNADVQNSGYVWGNYWGQGTQVTVS |
| | | SEQKLISEEDLNPGGGGGSGGGGSGGGGSGGGGSG |
| | | SMDIQMTQSPSSLSASVGDRVTITCRASQDIRNYL |
| | | NWYQQKPGKAPKLLIYYTSRLESGVPSRFSGSGSG |
| | | TDYTLTISSLQPEDFATYYCQQGNTLPWTFGQGTK |
| | | VEIKGGGGSGGGGSGGGGSEVQLVESGGGLVQPGG |
| | | SLRLSCAASGYSFTGYTMNWVRQAPGKGLEWVALI |
| | | NPTKGVSTYNQKFKDRFTISVDKSKNTAYLQMNSL |
| | | RAEDTAVYYCARSGYYGDSDWYFDVWGQGTLVTVS |
| | | STSGGGGSLESGQVLLESNIKVLPTWSTPVQPMAL |
| | | IVLGGVAGLLLFIGLGIFFCVRCRHRRRQAERMSQ |
| | | IKRLLSEKKTCQCPHRFQKTCSPI |
| 553 | Amino Acid | MALPVTALLLPLALLLHAARPEVQLVESGGGLVQP |
| | | GGSLRLSCAASRSIFVIAFMDWYRQAPGKQREFVA |
| | | GISSSGATSYADSVKGRFTVSRDTAKNTMYLQMNN |
| | | LLPEDSAVYYCKADTATNTDWGQGTQVTVSSEQKL |
| | | ISEEDLNPGGGGGSGGGGSGGGGSGGGGSGSMDIQ |
| | | MTQSPSSLSASVGDRVTITCRASQDIRNYLNWYQQ |
| | | KPGKAPKLLIYYTSRLESGVPSRFSGSGSGTDYTL |
| | | TISSLQPEDFATYYCQQGNTLPWTFGQGTKVEIKG |
| | | GGGSGGGGSGGGGSEVQLVESGGGLVQPGGSLRLS |
| | | CAASGYSFTGYTMNWVRQAPGKGLEWVALINPTKG |
| | | VSTYNQKFKDRFTISVDKSKNTAYLQMNSLRAEDT |
| | | AVYYCARSGYYGDSDWYFDVWGQGTLVTVSSTSGG |
| | | GGSLESGQVLLESNIKVLPTWSTPVQPMALIVLGG |
| | | VAGLLLFIGLGIFFCVRCRHRRRQAERMSQIKRLL |
| | | SEKKTCQCPHRFQKTCSPI |
| 554 | Amino Acid | MALPVTALLLPLALLLHAARPEVKLVESGGGLVQP |
| | | GGSLKLSCAASGFTFSSYGLSWVRQTPDKGLELVA |
| | | SINRNGGNTYYTDSVKGRFTISRDNAKNTLNLQMS |
| | | SLKSEDTAMYYCARGGFTYWGQGTLVTVSAGSTSG |
| | | SGKPGSGEGSTKGQIVLTQSPAIMSAFPGEKVTMT |
| | | CSASSSVGYMYWYQQKPGSSPRLLIYDTSNLASGV |
| | | PVRFSGSGSGTAYSLTISRMEAEDAATYYCQQWSG |
| | | YPPITFGAGTKLELKEQKLISEEDLNPGGGGGSGG |
| | | GGSGGGGSGGGGSGSMDIQMTQSPSSLSASVGDRV |
| | | TITCRASQDIRNYLNWYQQKPGKAPKLLIYYTSRL |
| | | ESGVPSRFSGSGSGTDYTLTISSLQPEDFATYYCQ |
| | | QGNTLPWTFGQGTKVEIKGGGGSGGGGSGGGGSEV |
| | | QLVESGGGLVQPGGSLRLSCAASGYSFTGYTMNWV |
| | | RQAPGKGLEWVALINPYKGVSTYNQKFKDRFTISV |
| | | DKSKNTAYLQMNSLRAEDTAVYYCARSGYYGDSDW |
| | | YFDVWGQGTLVTVSSTSGGGGSLESGQVLLESNIK |
| | | VLPTWSTPVQPMALIVLGGVAGLLLFIGLGIFFCV |
| | | RCRHRRRQAERMSQIKRLLSEKKTCQCPHRFQKTC |
| | | SPI |
| 555 | Amino Acid | MALPVTALLLPLALLLHAARPQIVLTQSPAIMSAF |
| | | PGEKVTMTCSASSSVGYMYWYQQKPGSSPRLLIYD |
| | | TSNLASGVPVRFSGSGSGTAYSLTISRMEAEDAAT |
| | | YYCQQWSGYPPITFGAGTKLELKGSTSGSGKPGSG |
| | | EGSTKGEVKLVESGGGLVQPGGSLKLSCAASGFTF |
| | | SSYGLSWVRQTPDKGLELVASINRNGGNTYYTDSV |
| | | KGRFTISRDNAKNTLNLQMSSLKSEDTAMYYCARG |
| | | GFTYWGQGTLVTVSAEQKLISEEDLNPGGGGGSGG |
| | | GGSGGGGSGGGGSGSMDIQMTQSPSSLSASVGDRV |
| | | TITCRASQDIRNYLNWYQQKPGKAPKLLIYYTSRL |
| | | ESGVPSRFSGSGSGTDYTLTISSLQPEDFATYYCQ |
| | | QGNTLPWTFGQGTKVEIKGGGGSGGGGSGGGGSEV |
| | | QLVESGGGLVQPGGSLRLSCAASGYSFTGYTMNWV |
| | | RQAPGKGLEWVALINPYKGVSTYNQKFKDRFTISV |
| | | DKSKNTAYLQMNSLRAEDTAVYYCARSGYYGDSDW |
| | | YFDVWGQGTLVTVSSTSGGGGSLESGQVLLESNIK |
| | | VLPTWSTPVQPMALIVLGGVAGLLLFIGLGIFFCV |
| | | RCRHRRRQAERMSQIKRLLSEKKTCQCPHRFQKTC |
| | | SPI |
| 556 | Amino Acid | MALPVTALLLPLALLLHAARPQVQLKESGGGLVQP |
| | | GGSLKLSCTTSGFTFSSYGLSWIRQTPDKRLELVA |
| | | SINRNGDNTYYTDSVRGRFTISRDNAKSTLNLQMS |
| | | SLKSEDTAMYYCTRGGFSYWGQGTLVTVSAGSTSG |
| | | SGKPGSGEGSTKGQIVLTQSPPLMSASPGEKVTMT |
| | | CSASSSVGYMYWFQQRPGSSPRLLIYDTYNLASGV |
| | | PVRFSGSGSGTSYSLTISRLEAEDAATYYCQQWSG |
| | | YPPITFGAGTKLELREQKLISEEDLNPGGGGGSGG |
| | | GGSGGGGSGGGGSGSMDIQMTQSPSSLSASVGDRV |
| | | TITCRASQDIRNYLNWYQQKPGKAPKLLIYYTSRL |
| | | ESGVPSRFSGSGSGTDYTLTISSLQPEDFATYYCQ |
| | | QGNTLPWTFGQGTKVEIKGGGGSGGGGSGGGGSEV |
| | | QLVESGGGLVQPGGSLRLSCAASGYSFTGYTMNWV |
| | | RQAPGKGLEWVALINPYKGVSTYNQKFKDRFTISV |
| | | DKSKNTAYLQMNSLRAEDTAVYYCARSGYYGDSDW |
| | | YFDVWGQGTLVTVSSTSGGGGSLESGQVLLESNIK |
| | | VLPTWSTPVQPMALIVLGGVAGLLLFIGLGIFFCV |
| | | RCRHRRRQAERMSQIKRLLSEKKTCQCPHRFQKTC |
| | | SPI |
| 557 | Amino Acid | MALPVTALLLPLALLLHAARPQIVLTQSPPLMSAS |
| | | PGEKVTMTCSASSSVGYMYWFQQRPGSSPRLLIYD |
| | | TYNLASGVPVRFSGSGSGTSYSLTISRLEAEDAAT |
| | | YYCQQWSGYPPITFGAGTKLELRGSTSGSGKPGSG |
| | | EGSTKGQVQLKESGGGLVQPGGSLKLSCTTSGFTF |
| | | SSYGLSWIRQTPDKRLELVASINRNGDNTYYTDSV |
| | | RGRFTISRDNAKSTLNLQMSSLKSEDTAMYYCTRG |
| | | GFSYWGQGTLVTVSAEQKLISEEDLNPGGGGGSGG |
| | | GGSGGGGSGGGGSGSMDIQMTQSPSSLSASVGDRV |
| | | TITCRASQDIRNYLNWYQQKPGKAPKLLIYYTSRL |
| | | ESGVPSRFSGSGSGTDYTLTISSLQPEDFATYYCQ |
| | | QGNTLPWTFGQGTKVEIKGGGGSGGGGSGGGGSEV |
| | | QLVESGGGLVQPGGSLRLSCAASGYSFTGYTMNWV |
| | | RQAPGKGLEWVALINPYKGVSTYNQKFKDRFTISV |
| | | DKSKNTAYLQMNSLRAEDTAVYYCARSGYYGDSDW |
| | | YFDVWGQGTLVTVSSTSGGGGSLESGQVLLESNIK |
| | | VLPTWSTPVQPMALIVLGGVAGLLLFIGLGIFFCV |
| | | RCRHRRRQAERMSQIKRLLSEKKTCQCPHRFQKTC |
| | | SPI |
| 558 | Amino Acid | MALPVTALLLPLALLLHAARPQVQLKESGGGLVRP |
| | | GGSLKLSCAASGFTFSNYGMSWIRQTPDKNLELVA |
| | | SINTSGGNTYYPDSVKGRFTISRDNARATLNLQMS |
| | | NLKSEDTAIYYCTRGGFTHWGQGTLVAVSAGSTSG |
| | | SGKPGSGEGSTKGQIVLTQSPAIMSASPGEKVTMT |
| | | CSASSSVSYMYWYQQKPGSSPRLLIYDTSNLASGV |
| | | PVRFSGSGSGTSYFLTISRMEAEDAATYYCQQWTG |
| | | YPPITFGAGTKLELREQKLISEEDLNPGGGGGSGG |
| | | GGSGGGGSGGGGSGSMDIQMTQSPSSLSASVGDRV |
| | | TITCRASQDIRNYLNWYQQKPGKAPKLLIYYTSRL |
| | | ESGVPSRFSGSGSGTDYTLTISSLQPEDFATYYCQ |
| | | QGNTLPWTFGQGTKVEIKGGGGSGGGGSGGGGSEV |
| | | QLVESGGGLVQPGGSLRLSCAASGYSFTGYTMNWV |
| | | RQAPGKGLEWVALINPYKGVSTYNQKFKDRFTISV |
| | | DKSKNTAYLQMNSLRAEDTAVYYCARSGYYGDSDW |
| | | YFDVWGQGTLVTVSSTSGGGGSLESGQVLLESNIK |
| | | VLPTWSTPVQPMALIVLGGVAGLLLFIGLGIFFCV |
| | | RCRHRRRQAERMSQIKRLLSEKKTCQCPHRFQKTC |
| | | SPI |
| 559 | Amino Acid | MALPVTALLLPLALLLHAARPQIVLTQSPAIMSAS |
| | | PGEKVTMTCSASSSVSYMYWYQQKPGSSPRLLIYD |
| | | TSNLASGVPVRFSGSGSGTSYFLTISRMEAEDAAT |
| | | YYCQQWTGYPPITFGAGTKLELRGSTSGSGKPGSG |
| | | EGSTKGQVQLKESGGGLVRPGGSLKLSCAASGFTF |
| | | SNYGMSWIRQTPDKNLELVASINTSGGNTYYPDSV |
| | | KGRFTISRDNARATLNLQMSNLKSEDTAIYYCTRG |
| | | GFTHWGQGTLVAVSAEQKLISEEDLNPGGGGGSGG |
| | | GGSGGGGSGGGGSGSMDIQMTQSPSSLSASVGDRV |
| | | TITCRASQDIRNYLNWYQQKPGKAPKLLIYYTSRL |
| | | ESGVPSRFSGSGSGTDYTLTISSLQPEDFATYYCQ |
| | | QGNTLPWTFGQGTKVEIKGGGGSGGGGSGGGGSEV |
| | | QLVESGGGLVQPGGSLRLSCAASGYSFTGYTMNWV |
| | | RQAPGKGLEWVALINPYKGVSTYNQKFKDRFTISV |
| | | DKSKNTAYLQMNSLRAEDTAVYYCARSGYYGDSDW |
| | | YFDVWGQGTLVTVSSTSGGGGSLESGQVLLESNIK |
| | | VLPTWSTPVQPMALIVLGGVAGLLLFIGLGIFFCV |
| | | RCRHRRRQAERMSQIKRLLSEKKTCQCPHRFQKTC |
| | | SPI |
| 560 | Amino Acid | MALPVTALLLPLALLLHAARPQVQLKESGGGLVQP |
| | | GGSLKLSCAASGFPFSSYGLSWVRQTPDKRLELVA |
| | | TINRNGDSAYYPDSVKGRFTISRDDAKNTLYLQMS |
| | | SLKSEDTAMYYCTRGGFAYWGQGTLVTVSAGSTSG |
| | | SGKPGSGEGSTKGQIVLTQSPAIMSASPGEKVTMT |
| | | CSGSSSVGYMYWYQQKPGFSPRLLIYDTSNLASGV |
| | | PVRFSGSGSGTSYSLTISRMEAEDAATYYCQQWSG |
| | | YPPITFGAGTKLELKEQKLISEEDLNPGGGGGSGG |
| | | GGSGGGGSGGGGSGSMDIQMTQSPSSLSASVGDRV |
| | | TITCRASQDIRNYLNWYQQKPGKAPKLLIYYTSRL |
| | | ESGVPSRFSGSGSGTDYTLTISSLQPEDFATYYCQ |
| | | QGNTLPWTFGQGTKVEIKGGGGSGGGGSGGGGSEV |
| | | QLVESGGGLVQPGGSLRLSCAASGYSFTGYTMNWV |
| | | RQAPGKGLEWVALINPYKGVSTYNQKFKDRFTISV |
| | | DKSKNTAYLQMNSLRAEDTAVYYCARSGYYGDSDW |
| | | YFDVWGQGTLVTVSSTSGGGGSLESGQVLLESNIK |
| | | VLPTWSTPVQPMALIVLGGVAGLLLFIGLGIFFCV |
| | | RCRHRRRQAERMSQIKRLLSEKKTCQCPHRFQKTC |
| | | SPI |
| 561 | Amino Acid | MALPVTALLLPLALLLHAARPQIVLTQSPAIMSAS |
| | | PGEKVTMTCSGSSSVGYMYWYQQKPGFSPRLLIYD |
| | | TSNLASGVPVRFSGSGSGTSYSLTISRMEAEDAAT |
| | | YYCQQWSGYPPITFGAGTKLELKGSTSGSGKPGSG |
| | | EGSTKGQVQLKESGGGLVQPGGSLKLSCAASGFPF |
| | | SSYGLSWVRQTPDKRLELVATINRNGDSAYYPDSV |
| | | KGRFTISRDDAKNTLYLQMSSLKSEDTAMYYCTRG |
| | | GFAYWGQGTLVTVSAEQKLISEEDLNPGGGGGSGG |
| | | GGSGGGGSGGGGSGSMDIQMTQSPSSLSASVGDRV |
| | | TITCRASQDIRNYLNWYQQKPGKAPKLLIYYTSRL |
| | | ESGVPSRFSGSGSGTDYTLTISSLQPEDFATYYCQ |
| | | QGNTLPWTFGQGTKVEIKGGGGSGGGGSGGGGSEV |
| | | QLVESGGGLVQPGGSLRLSCAASGYSFTGYTMNWV |
| | | RQAPGKGLEWVALINPYKGVSTYNQKFKDRFTISV |
| | | DKSKNTAYLQMNSLRAEDTAVYYCARSGYYGDSDW |
| | | YFDVWGQGTLVTVSSTSGGGGSLESGQVLLESNIK |
| | | VLPTWST |
| | | PVQPMALIVLGGVAGLLLFIGLGIFFCVRCRHRRR |
| | | QAERMSQIKRLLSEKKTCQCPHRFQKTCSPI |
| 562 | Amino Acid | MALPVTALLLPLALLLHAARPQVQLQESGGGLVQP |
| | | GGSLRLSCAASRSIFGIAFMDWYRQAPGKQREFVA |
| | | GISHSGATSYADSVKGRFTVSRDNAKNTMYLQMNN |
| | | LLPEDSAVYYCKADTATNTDWGQGTQVTVSSEQKL |
| | | ISEEDLNPGGGGGSGGGGSGGGGSGGGGSGSMDIQ |
| | | MTQSPSSLSASVGDRVTITCRASQDIRNYLNWYQQ |
| | | KPGKAPKLLIYYTSRLESGVPSRFSGSGSGTDYTL |
| | | TISSLQPEDFATYYCQQGNTLPWTFGQGTKVEIKG |
| | | GGGGGGGSGGGGSEVQLVESGGGLVQPGGSLRLSC |
| | | AASGYSFTGYTMNWVRQAPGKGLEWVALINPYKGV |
| | | STYNQKFKDRFTISVDKSKNTAYLQMNSLRAEDTA |
| | | VYYCARSGYYGDSDWYFDVWGQGTLVTVSSTSGGG |
| | | GSLESGQVLLESNIKVLPTWSTPVQPMALIVLGGV |
| | | AGLLLFIGLGIFFCVRCRHRRRQAERMSQIKRLLS |
| | | EKKTCQCPHRFQKTCSPI |
| 563 | Amino Acid | MALPVTALLLPLALLLHAARPEVQLVESGGGLVQP |
| | | GGSLRLSCAASRSIFVIAFMDWYRQAPGKQREFVA |
| | | GISSSGATSYASSVKGRFTVSRDTAKNTMYLQMNN |
| | | LLPEDSAVYYCKADTATTTDWGQGTQVTVSSEQKL |
| | | ISEEDLNPGGGGGSGGGGSGGGGSGGGGSGSMDIQ |
| | | MTQSPSSLSASVGDRVTITCRASQDIRNYLNWYQQ |
| | | KPGKAPKLLIYYTSRLESGVPSRFSGSGSGTDYTL |
| | | TISSLQPEDFATYYCQQGNTLPWTFGQGTKVEIKG |
| | | GGGSGGGGSGGGGSEVQLVESGGGLVQPGGSLRLS |
| | | CAASGYSFTGYTMNWVRQAPGKGLEWVALINPYKG |
| | | VSTYNQKFKDRFTISVDKSKNTAYLQMNSLRAEDT |
| | | AVYYCARSGYYGDSDWYFDVWGQGTLVTVSSTSGG |
| | | GGSLESGQVLLESNIKVLPTWSTPVQPMALIVLGG |
| | | VAGLLLFIGLGIFFCVRCRHRRRQAERMSQIKRLL |
| | | SEKKTCQCPHRFQKTCSPI |
| 564 | Amino Acid | MALPVTALLLPLALLLHAARPEVQLVESGGGLVQP |
| | | GGSLRLSCAASGIIFSINTMAWYRQGPGKERDLVA |
| | | VIKGDGSTSYADSVNGRFTISRDNAKNTVYLRMNG |
| | | LKPEDTAVYYCNSAGRSYSGVYGAYWGQGTQVTVS |
| | | SEQKLISEEDLNPGGGGGSGGGGSGGGGSGGGGSG |
| | | SMDIQMTQSPSSLSASVGDRVTITCRASQDIRNYL |
| | | NWYQQKPGKAPKLLIYYTSRLESGVPSRFSGSGSG |
| | | TDYTLTISSLQPEDFATYYCQQGNTLPWTFGQGTK |
| | | VEIKGGGGSGGGGSGGGGSEVQLVESGGGLVQPGG |
| | | SLRLSCAASGYSFTGYTMNWVRQAPGKGLEWVALI |
| | | NPYKGVSTYNQKFKDRFTISVDKSKNTAYLQMNSL |
| | | RAEDTAVYYCARSGYYGDSDWYFDVWGQGTLVTVS |
| | | STSGGGGSLESGQVLLESNIKVLPTWSTPVQPMAL |
| | | IVLGGVAGLLLFIGLGIFFCVRCRHRRRQAERMSQ |
| | | IKRLLSEKKTCQCPHRFQKTCSPI |
| 565 | Amino Acid | MALPVTALLLPLALLLHAARPEVQLQESGGGLVQP |
| | | GGSLKLSCAASGSIFSIGAMRWYRQVPGNERELVA |
| | | GITNGGNTNYADSVKARFTISRDNAKNTVYLQMNS |
| | | LKPEDTTVYFCNADVQNSGYVWGNYWGQGTQVTVS |
| | | SEQKLISEEDLNPGGGGGSGGGGSGGGGSGGGGSG |
| | | SMDIQMTQSPSSLSASVGDRVTITCRASQDIRNYL |
| | | NWYQQKPGKAPKLLIYYTSRLESGVPSRFSGSGSG |
| | | TDYTLTISSLQPEDFATYYCQQGNTLPWTFGQGTK |
| | | VEIKGGGGSGGGGSGGGGSEVQLVESGGGLVQPGG |
| | | SLRLSCAASGYSFTGYTMNWVRQAPGKGLEWVALI |
| | | NPYKGVSTYNQKFKDRFTISVDKSKNTAYLQMNSL |
| | | RAEDTAVYYCARSGYYGDSDWYFDVWGQGTLVTVS |
| | | STSGGGGSLESGQVLLESNIKVLPTWSTPVQPMAL |
| | | IVLGGVAGLLLFIGLGIFFCVRCRHRRRQAERMSQ |
| | | IKRLLSEKKTCQCPHRFQKTCSPI |
| 566 | Amino Acid | MALPVTALLLPLALLLHAARPEVQLVESGGGLVQP |
| | | GGSLRLSCAASRSIFVIAFMDWYRQAPGKQREFVA |
| | | GISSSGATSYADSVKGRFTVSRDTAKNTMYLQMNN |
| | | LLPEDSAVYYCKADTATNTDWGQGTQVTVSSEQKL |
| | | ISEEDLNPGGGGGSGGGGSGGGGSGGGGSGSMDIQ |
| | | MTQSPSSLSASVGDRVTITCRASQDIRNYLNWYQQ |
| | | KPGKAPKLLIYYTSRLESGVPSRFSGSGSGTDYTL |
| | | TISSLQPEDFATYYCQQGNTLPWTFGQGTKVEIKG |
| | | GGGSGGGGSGGGGSEVQLVESGGGLVQPGGSLRLS |
| | | CAASGYSFTGYTMNWVRQAPGKGLEWVALINPYKG |
| | | VSTYNQKFKDRFTISVDKSKNTAYLQMNSLRAEDT |
| | | AVYYCARSGYYGDSDWYFDVWGQGTLVTVSSTSGG |
| | | GGSLESGQVLLESNIKVLPTWSTPVQPMALIVLGG |
| | | VAGLLLFIGLGIFFCVRCRHRRRQAERMSQIKRLL |
| | | SEKKTCQCPHRFQKTCSPI |
| 567 | Amino Acid | MALPVTALLLPLALLLHAARPQVQLVESGGGLVQP |
| | | GGSLRLSCATSGIIFHIYTMGWYRGAPGKQRELVA |
| | | RITSGGDTNYADSVKGRFTISRDNVKNTMYLQMNS |
| | | LKPEDTAVYYCNRFPGATFSWGQGTQVTVSSEQKL |
| | | ISEEDLNPGGGGGSGGGGSGGGGSGGGGSGSMDIQ |
| | | MTQSPSSLSASVGDRVTITCRASQDIRNYLNWYQQ |
| | | KPGKAPKLLIYYTSRLESGVPSRFSGSGSGTDYTL |
| | | TISSLQPEDFATYYCQQGNTLPWTFGQGTKVEIKG |
| | | GGGSGGGGSGGGGSEVQLVESGGGLVQPGGSLRLS |
| | | CAASGYSFTGYTMNWVRQAPGKGLEWVALINPYKG |
| | | VSTYNQKFKDRFTISVDKSKNTAYLQMNSLRAEDT |
| | | AVYYCARSGYYGDSDWYFDVWGQGTLVTVSSTSGG |
| | | GGSLESGQVLLESNIKVLPTWSTPVQPMALIVLGG |
| | | VAGLLLFIGLGIFFCVRCRHRRRQAERMSQIKRLL |
| | | SEKKTCQCPHRFQKTCSPI |
| 568 | Amino Acid | MALPVTALLLPLALLLHAARPQLQLVESGGGLVQA |
| | | GGSLRLSCAVSGNIWVFTVMAWYRQVPGKQRELVA |
| | | ASTNGGSTNYADSVKGRFTISRDNVKNTVYLQMNS |
| | | LKPEDTAVYYCNRQRTVIGMNPLAPWGQGTQVTVS |
| | | SEQKLISEEDLNPGGGGGSGGGGSGGGGSGGGGSG |
| | | SMDIQMTQSPSSLSASVGDRVTITCRASQDIRNYL |
| | | NWYQQKPGKAPKLLIYYTSRLESGVPSRFSGSGSG |
| | | TDYTLTISSLQPEDFATYYCQQGNTLPWTFGQGTK |
| | | VEIKGGGGSGGGGSGGGGSEVQLVESGGGLVQPGG |
| | | SLRLSCAASGYSFTGYTMNWVRQAPGKGLEWVALI |
| | | NPYKGVSTYNQKFKDRFTISVDKSKNTAYLQMNSL |
| | | RAEDTAVYYCARSGYYGDSDWYFDVWGQGTLVTVS |
| | | STSGGGGSLESGQVLLESNIKVLPTWSTPVQPMAL |
| | | IVLGGVAGLLLFIGLGIFFCVRCRHRRRQAERMSQ |
| | | IKRLLSEKKTCQCPHRFQKTCSPI |
| 569 | Amino Acid | MALPVTALLLPLALLLHAARPQVQLVESGGGLVQP |
| | | GGSLRLSCAVSRNIASLYRVDWYRQAPGKQRELVA |
| | | GRTSGGTTTYLDAVEGRFTISRDNVKDTVYLQMNS |
| | | LTPEDTAVYYCHAHDHWRDSWGQGTQVTVSSEQKL |
| | | ISEEDLNPGGGGGSGGGGSGGGGSGGGGSGSMDIQ |
| | | MTQSPSSLSASVGDRVTITCRASQDIRNYLNWYQQ |
| | | KPGKAPKLLIYYTSRLESGVPSRFSGSGSGTDYTL |
| | | TISSLQPEDFATYYCQQGNTLPWTFGQGTKVEIKG |
| | | GGGSGGGGSGGGGSEVQLVESGGGLVQPGGSLRLS |
| | | CAASGYSFTGYTMNWVRQAPGKGLEWVALINPYKG |
| | | VSTYNQKFKDRFTISVDKSKNTAYLQMNSLRAEDT |
| | | AVYYCARSGYYGDSDWYFDVWGQGTLVTVSSTSGG |
| | | GGSLESGQVLLESNIKVLPTWSTPVQPMALIVLGG |
| | | VAGLLLFIGLGIFFCVRCRHRRRQAERMSQIKRLL |
| | | SEKKTCQCPHRFQKTCSPI |
| 570 | Amino Acid | MALPVTALLLPLALLLHAARPEVQLVESGGGLVQP |
| | | GGSLRLSCAASRNIFSLYRVDWYRQAPGKQRELVA |
| | | GSTSGGTTTYADAVKGRFTISTDNVKDTVYLQMNS |
| | | LTPEDTAVYYCHAHDHWRDSWGQGTQVTVSSEQKL |
| | | ISEEDLNPGGGGGSGGGGSGGGGSGGGGSGSMDIQ |
| | | MTQSPSSLSASVGDRVTITCRASQDIRNYLNWYQQ |
| | | KPGKAPKLLIYYTSRLESGVPSRFSGSGSGTDYTL |
| | | TISSLQPEDFATYYCQQGNTLPWTFGQGTKVEIKG |
| | | GGGSGGGGSGGGGSEVQLVESGGGLVQPGGSLRLS |
| | | CAASGYSFTGYTMNWVRQAPGKGLEWVALINPYKG |
| | | VSTYNQKFKDRFTISVDKSKNTAYLQMNSLRAEDT |
| | | AVYYCARSGYYGDSDWYFDVWGQGTLVTVSSTSGG |
| | | GGSLESGQVLLESNIKVLPTWSTPVQPMALIVLGG |
| | | VAGLLLFIGLGIFFCVRCRHRRRQAERMSQIKRLL |
| | | SEKKTCQCPHRFQKTCSPI |
| 571 | Amino Acid | MALPVTALLLPLALLLHAARPQVQLVQSGAEVKKP |
| | | GSSVKVSCKASGGTFSSYAISWVRQAPGQGLEWMG |
| | | GIIPIFGTANYAQKFQGRVTITADESTSTAYMELS |
| | | SLRSEDTAVYYCARDILRLSVSSGMDVWGQGTLVT |
| | | VSSGSTSGSGKPGSGEGSTKGQSVLTQPPSASGTP |
| | | GQRVTISCSGSSSNIGSNYVYWYQQLPGTAPKLLI |
| | | YRNNQRPSGVPDRLSGSKSGTSASLAISGLRSEDE |
| | | ADYYCAAWDDSLSAVVFGGGTKLTVLEQKLISEED |
| | | LNPGGGGGSGGGGSGGGGSGGGGSGSMDIQMTQSP |
| | | SSLSASVGDRVTITCRASQDIRNYLNWYQQKPGKA |
| | | PKLLIYYTSRLESGVPSRFSGSGSGTDYTLTISSL |
| | | QPEDFATYYCQQGNTLPWTFGQGTKVEIKGGGGSG |
| | | GGGSGGGGSEVQLVESGGGLVQPGGSLRLSCAASG |
| | | YSFTGYTMNWVRQAPGKGLEWVALINPYKGVSTYN |
| | | QKFKDRFTISVDKSKNTAYLQMNSLRAEDTAVYYC |
| | | ARSGYYGDSDWYFDVWGQGTLVTVSSTSGGGGSLE |
| | | SGQVLLESNIKVLPTWSTPVQPMALIVLGGVAGLL |
| | | LFIGLGIFFCVRCRHRRRQAERMSQIKRLLSEKKT |
| | | CQCPHRFQKTCSPI |
| 572 | Amino Acid | MALPVTALLLPLALLLHAARPQSVLTQPPSASGTP |
| | | GQRVTISCSGSSSNIGSNYVYWYQQLPGTAPKLLI |
| | | YRNNQRPSGVPDRLSGSKSGTSASLAISGLRSEDE |
| | | ADYYCAAWDDSLSAVVFGGGTKLTVLGSTSGSGKP |
| | | GSGEGSTKGQVQLVQSGAEVKKPGSSVKVSCKASG |
| | | GTFSSYAISWVRQAPGQGLEWMGGIIPIFGTANYA |
| | | QKFQGRVTITADESTSTAYMELSSLRSEDTAVYYC |
| | | ARDILRLSVSSGMDVWGQGTLVTVSSEQKLISEED |
| | | LNPGGGGGSGGGGSGGGGSGGGGSGSMDIQMTQSP |
| | | SSLSASVGDRVTITCRASQDIRNYLNWYQQKPGKA |
| | | PKLLIYYTSRLESGVPSRFSGSGSGTDYTLTISSL |
| | | QPEDFATYYCQQGNTLPWTFGQGTKVEIKGGGGSG |
| | | GGGSGGGGSEVQLVESGGGLVQPGGSLRLSCAASG |
| | | YSFTGYTMNWVRQAPGKGLEWVALINPYKGVSTYN |
| | | QKFKDRFTISVDKSKNTAYLQMNSLRAEDTAVYYC |
| | | ARSGYYGDSDWYFDVWGQGTLVTVSSTSGGGGSLE |
| | | SGQVLLESNIKVLPTWSTPVQPMALIVLGGVAGLL |
| | | LFIGLGIFFCVRCRHRRRQAERMSQIKRLLSEKKT |
| | | CQCPHRFQKTCSPI |
| 573 | Amino Acid | MALPVTALLLPLALLLHAARPQVQLQESGGGVVQP |
| | | GRSLRLSCAASGFTLSSYGMHWVRQAPGKGLEWVA |
| | | VISYDGSNKYYADSVKGRFTISRDNSKNTLYLQMN |
| | | SLRAEDTAVYYCAKSGWRYYYYYGMDVWGQGTLVT |
| | | VSSGSTSGSGKPGSGEGSTKGQSVLTQPPSVSGAP |
| | | GQRVTISCTGSSSNIGAGYDVHWYQQLPGTAPKLL |
| | | IYGNSNRPSGVPDRFSGSKSGTSASLAITGLQAED |
| | | EADYYCQSYDSSLSGSVFGGGTKLTVLEQKLISEE |
| | | DLNPGGGGGSGGGGSGGGGSGGGGSGSMDIQMTQS |
| | | PSSLSASVGDRVTITCRASQDIRNYLNWYQQKPGK |
| | | APKLLIYYTSRLESGVPSRFSGSGSGTDYTLTISS |
| | | LQPEDFATYYCQQGNTLPWTFGQGTKVEIKGGGGG |
| | | GGGSGGGGSEVQLVESGGGLVQPGGSLRLSCAASG |
| | | YSFTGYTMNWVRQAPGKGLEWVALINPYKGVSTYN |
| | | QKFKDRFTISVDKSKNTAYLQMNSLRAEDTAVYYC |
| | | ARSGYYGDSDWYFDVWGQGTLVTVSSTSGGGGSLE |
| | | SGQVLLESNIKVLPTWSTPVQPMALIVLGGVAGLL |
| | | LFIGLGIFFCVRCRHRRRQAERMSQIKRLLSEKKT |
| | | CQCPHRFQKTCSPI |
| 574 | Amino Acid | MALPVTALLLPLALLLHAARPQSVLTQPPSVSGAP |
| | | GQRVTISCTGSSSNIGAGYDVHWYQQLPGTAPKLL |
| | | IYGNSNRPSGVPDRFSGSKSGTSASLAITGLQAED |
| | | EADYYCQSYDSSLSGSVFGGGTKLTVLGSTSGSGK |
| | | PGSGEGSTKGQVQLQESGGGVVQPGRSLRLSCAAS |
| | | GFTLSSYGMHWVRQAPGKGLEWVAVISYDGSNKYY |
| | | ADSVKGRFTISRDNSKNTLYLQMNSLRAEDTAVYY |
| | | CAKSGWRYYYYYGMDVWGQGTLVTVSSEQKLISEE |
| | | DLNPGGGGGSGGGGSGGGGSGGGGSGSMDIQMTQS |
| | | PSSLSASVGDRVTITCRASQDIRNYLNWYQQKPGK |
| | | APKLLIYYTSRLESGVPSRFSGSGSGTDYTLTISS |
| | | LQPEDFATYYCQQGNTLPWTFGQGTKVEIKGGGGS |
| | | GGGGSGGGGSEVQLVESGGGLVQPGGSLRLSCAAS |
| | | GYSFTGYTMNWVRQAPGKGLEWVALINPYKGVSTY |
| | | NQKFKDRFTISVDKSKNTAYLQMNSLRAEDTAVYY |
| | | CARSGYYGDSDWYFDVWGQGTLVTVSSTSGGGGSL |
| | | ESGQVLLESNIKVLPTWSTPVQPMALIVLGGVAGL |
| | | LLFIGLGIFFCVRCRHRRRQAERMSQIKRLLSEKK |
| | | TCQCPHRFQKTCSPI |
| 575 | Amino Acid | MALPVTALLLPLALLLHAARPEVQLLESGGGLVQP |
| | | GGSLRLSCAASGFTFSSYWMSWVRQAPGKGLEWVA |
| | | NIKQDGSEKYYVDSVKGRFTISRDNAKNSLYLQMN |
| | | SLRAEDTAVYYCARPAGQLLYGMDVWGQGTLVTVS |
| | | SGSTSGSGKPGSGEGSTKGSYVLTQPPSVSVSPGQ |
| | | TARITCSGDALPKQYAYWYQQKPGQAPVLVIYKDS |
| | | ERPSGIPERFSGSSSGTTVTLTISGVQAEDEADYY |
| | | CQSADSSGTWVFGGGTKLTVLEQKLISEEDLNPGG |
| | | GGGSGGGGSGGGGSGGGGSGSMDIQMTQSPSSLSA |
| | | SVGDRVTITCRASQDIRNYLNWYQQKPGKAPKLLI |
| | | YYTSRLESGVPSRFSGSGSGTDYTLTISSLQPEDF |
| | | ATYYCQQGNTLPWTFGQGTKVEIKGGGGSGGGGSG |
| | | GGGSEVQLVESGGGLVQPGGSLRLSCAASGYSFTG |
| | | YTMNWVRQAPGKGLEWVALINPYKGVSTYNQKFKD |
| | | RFTISVDKSKNTAYLQMNSLRAEDTAVYYCARSGY |
| | | YGDSDWYFDVWGQGTLVTVSSTSGGGGSLESGQVL |
| | | LESNIKVLPTWSTPVQPMALIVLGGVAGLLLFIGL |
| | | GIFFCVRCRHRRRQAERMSQIKRLLSEKKTCQCPH |
| | | RFQKTCSPI |
| 576 | Amino Acid | MALPVTALLLPLALLLHAARPSYVLTQPPSVSVSP |
| | | GQTARITCSGDALPKQYAYWYQQKPGQAPVLVIYK |
| | | DSERPSGIPERFSGSSSGTTVTLTISGVQAEDEAD |
| | | YYCQSADSSGTWVFGGGTKLTVLGSTSGSGKPGSG |
| | | EGSTKGEVQLLESGGGLVQPGGSLRLSCAASGFTF |
| | | SSYWMSWVRQAPGKGLEWVANIKQDGSEKYYVDSV |
| | | KGRFTISRDNAKNSLYLQMNSLRAEDTAVYYCARP |
| | | AGQLLYGMDVWGQGTLVTVSSEQKLISEEDLNPGG |
| | | GGGSGGGGSGGGGSGGGGSGSMDIQMTQSPSSLSA |
| | | SVGDRVTITCRASQDIRNYLNWYQQKPGKAPKLLI |
| | | YYTSRLESGVPSRFSGSGSGTDYTLTISSLQPEDF |
| | | ATYYCQQGNTLPWTFGQGTKVEIKGGGGSGGGGGG |
| | | GGSEVQLVESGGGLVQPGGSLRLSCAASGYSFTGY |
| | | TMNWVRQAPGKGLEWVALINPYKGVSTYNQKFKDR |
| | | FTISVDKSKNTAYLQMNSLRAEDTAVYYCARSGYY |
| | | GDSDWYFDVWGQGTLVTVSSTSGGGGSLESGQVLL |
| | | ESNIKVLPTWSTPVQPMALIVLGGVAGLLLFIGLG |
| | | IFFCVRCRHRRRQAERMSQIKRLLSEKKTCQCPHR |
| | | FQKTCSPI |
| 577 | Amino Acid | MALPVTALLLPLALLLHAARPEVQLLESGGGVVQP |
| | | GRSLRLSCAASGFTFSSYGMHWVRQAPGKGLEWVA |
| | | VISYDGSNKYYADSVKGRFTISRDNSKNTLYLQMN |
| | | SLRAEDTAVYYCAKDAADMGAFDYWGQGTLVTVSS |
| | | GSTSGSGKPGSGEGSTKGDIQMTQSPDSLAVSLGE |
| | | RATMNCKSSQSVLYSSNNKNYLAWYQQKPGQPPKL |
| | | LIYWASARESGVPDRFSGSGSGTDFTLTISSLQAE |
| | | DVAVYYCQQYYSTPLTFGQGTKVEIKEQKLISEED |
| | | LNPGGGGGSGGGGSGGGGSGGGGSGSMDIQMTQSP |
| | | SSLSASVGDRVTITCRASQDIRNYLNWYQQKPGKA |
| | | PKLLIYYTSRLESGVPSRFSGSGSGTDYTLTISSL |
| | | QPEDFATYYCQQGNTLPWTFGQGTKVEIKGGGGSG |
| | | GGGSGGGGSEVQLVESGGGLVQPGGSLRLSCAASG |
| | | YSFTGYTMNWVRQAPGKGLEWVALINPYKGVSTYN |
| | | QKFKDRFTISVDKSKNTAYLQMNSLRAEDTAVYYC |
| | | ARSGYYGDSDWYFDVWGQGTLVTVSSTSGGGGSLE |
| | | SGQVLLESNIKVLPTWSTPVQPMALIVLGGVAGLL |
| | | LFIGLGIFFCVRCRHRRRQAERMSQIKRLLSEKKT |
| | | CQCPHRFQKTCSPI |
| 578 | Amino Acid | MALPVTALLLPLALLLHAARPDIQMTQSPDSLAVS |
| | | LGERATMNCKSSQSVLYSSNNKNYLAWYQQKPGQP |
| | | PKLLIYWASARESGVPDRFSGSGSGTDFTLTISSL |
| | | QAEDVAVYYCQQYYSTPLTFGQGTKVEIKGSTSGS |
| | | GKPGSGEGSTKGEVQLLESGGGVVQPGRSLRLSCA |
| | | ASGFTFSSYGMHWVRQAPGKGLEWVAVISYDGSNK |
| | | YYADSVKGRFTISRDNSKNTLYLQMNSLRAEDTAV |
| | | YYCAKDAADMGAFDYWGQGTLVTVSSEQKLISEED |
| | | LNPGGGGGSGGGGSGGGGSGGGGSGSMDIQMTQSP |
| | | SSLSASVGDRVTITCRASQDIRNYLNWYQQKPGKA |
| | | PKLLIYYTSRLESGVPSRFSGSGSGTDYTLTISSL |
| | | QPEDFATYYCQQGNTLPWTFGQGTKVEIKGGGGSG |
| | | GGGGGGGSEVQLVESGGGLVQPGGSLRLSCAASGY |
| | | SFTGYTMNWVRQAPGKGLEWVALINPYKGVSTYNQ |
| | | KFKDRFTISVDKSKNTAYLQMNSLRAEDTAVYYCA |
| | | RSGYYGDSDWYFDVWGQGTLVTVSSTSGGGGSLES |
| | | GQVLLESNIKVLPTWSTPVQPMALIVLGGVAGLLL |
| | | FIGLGIFFCVRCRHRRRQAERMSQIKRLLSEKKTC |
| | | QCPHRFQKTCSPI |
| 579 | Amino Acid | MALPVTALLLPLALLLHAARPEVQLLESGGGLVKP |
| | | GGSLRLSCAASGFTFSSYSMNWVRQAPGKGLEWVS |
| | | AISGSGGSTYYADSVKGRFTISRDNSKNTLYLQMN |
| | | SLRAEDTAVYYCARARGYSYGSDAFDIWGQGTMVT |
| | | VSSGSTSGSGKPGSGEGSTKGQSVLTQPPSASGTP |
| | | GQRVTISCSGSSSNIGSNYVYWYQQLPGTAPKLLI |
| | | YRNNQRPSGVPDRFSGSKSGTSASLAISGLRSEDE |
| | | ADYYCAAWDDSLSGVVFGGGTKLTVLEQKLISEED |
| | | LNPGGGGGSGGGGSGGGGSGGGGSGSMDIQMTQSP |
| | | SSLSASVGDRVTITCRASQDIRNYLNWYQQKPGKA |
| | | PKLLIYYTSRLESGVPSRFSGSGSGTDYTL |
| | | TISSLQPEDFATYYCQQGNTLPWTFGQGTKVEIKG |
| | | GGGSGGGGSGGGGSEVQLVESGGGLVQPGGSLRLS |
| | | CAASGYSFTGYTMNWVRQAPGKGLEWVALINPYKG |
| | | VSTYNQKFKDRFTISVDKSKNTAYLQMNSLRAEDT |
| | | AVYYCARSGYYGDSDWYFDVWGQGTLVTVSSTSGG |
| | | GGSLESGQVLLESNIKVLPTWSTPVQPMALIVLGG |
| | | VAGLLLFIGLGIFFCVRCRHRRRQAERMSQIKRLL |
| | | SEKKTCQCPHRFQKTCSPI |
| 580 | Amino Acid | MALPVTALLLPLALLLHAARPQSVLTQPPSASGTP |
| | | GQRVTISCSGSSSNIGSNYVYWYQQLPGTAPKLLI |
| | | YRNNQRPSGVPDRFSGSKSGTSASLAISGLRSEDE |
| | | ADYYCAAWDDSLSGVVFGGGTKLTVLGSTSGSGKP |
| | | GSGEGSTKGEVQLLESGGGLVKPGGSLRLSCAASG |
| | | FTFSSYSMNWVRQAPGKGLEWVSAISGSGGSTYYA |
| | | DSVKGRFTISRDNSKNTLYLQMNSLRAEDTAVYYC |
| | | ARARGYSYGSDAFDIWGQGTMVTVSSEQKLISEED |
| | | LNPGGGGGSGGGGSGGGGSGGGGSGSMDIQMTQSP |
| | | SSLSASVGDRVTITCRASQDIRNYLNWYQQKPGKA |
| | | PKLLIYYTSRLESGVPSRFSGSGSGTDYTLTISSL |
| | | QPEDFATYYCQQGNTLPWTFGQGTKVEIKGGGGSG |
| | | GGGSGGGGSEVQLVESGGGLVQPGGSLRLSCAASG |
| | | YSFTGYTMNWVRQAPGKGLEWVALINPYKGVSTYN |
| | | QKFKDRFTISVDKSKNTAYLQMNSLRAEDTAVYYC |
| | | ARSGYYGDSDWYFDVWGQGTLVTVSSTSGGGGSLE |
| | | SGQVLLESNIKVLPTWSTPVQPMALIVLGGVAGLL |
| | | LFIGLGIFFCVRCRHRRRQAERMSQIKRLLSEKKT |
| | | CQCPHRFQKTCSPI |
| 581 | Amino Acid | MALPVTALLLPLALLLHAARPEVQLVQSGAEVKKP |
| | | GSSVKVSCKASGGTFSSYAISWVRQAPGQGLEWMG |
| | | GIIPIFGTANYAQKFQGRVTITADESTSTAYMELS |
| | | SLRSEDTAVYYCARDRGRRYCSGGSCPNAFDIWGQ |
| | | GTMVTVSSGSTSGSGKPGSGEGSTKGEIVLTQSPA |
| | | TLSVSPGERATLSCRASQSVSSNLAWYQQKPGQAP |
| | | RLLIYGASTRATGIPARFSGSGSGTEFTLTISSLQ |
| | | SEDFAVYYCQQYNNWPPALTFGGGTKVEIKEQKLI |
| | | SEEDLNPGGGGGSGGGGSGGGGSGGGGSGSMDIQM |
| | | TQSPSSLSASVGDRVTITCRASQDIRNYLNWYQQK |
| | | PGKAPKLLIYYTSRLESGVPSRFSGSGSGTDYTLT |
| | | ISSLQPEDFATYYCQQGNTLPWTFGQGTKVEIKGG |
| | | GGGGGGSGGGGSEVQLVESGGGLVQPGGSLRLSCA |
| | | ASGYSFTGYTMNWVRQAPGKGLEWVALINPYKGVS |
| | | TYNQKFKDRFTISVDKSKNTAYLQMNSLRAEDTAV |
| | | YYCARSGYYGDSDWYFDVWGQGTLVTVSSTSGGGG |
| | | SLESGQVLLESNIKVLPTWSTPVQPMALIVLGGVA |
| | | GLLLFIGLGIFFCVRCRHRRRQAERMSQIKRLLSE |
| | | KKTCQCPHRFQKTCSPI |
| 582 | Amino Acid | MALPVTALLLPLALLLHAARPEIVLTQSPATLSVS |
| | | PGERATLSCRASQSVSSNLAWYQQKPGQAPRLLIY |
| | | GASTRATGIPARFSGSGSGTEFTLTISSLQSEDFA |
| | | VYYCQQYNNWPPALTFGGGTKVEIKGSTSGSGKPG |
| | | SGEGSTKGEVQLVQSGAEVKKPGSSVKVSCKASGG |
| | | TFSSYAISWVRQAPGQGLEWMGGIIPIFGTANYAQ |
| | | KFQGRVTITADESTSTAYMELSSLRSEDTAVYYCA |
| | | RDRGRRYCSGGSCPNAFDIWGQGTMVTVSSEQKLI |
| | | SEEDLNPGGGGGSGGGGSGGGGSGGGGSGSMDIQM |
| | | TQSPSSLSASVGDRVTITCRASQDIRNYLNWYQQK |
| | | PGKAPKLLIYYTSRLESGVPSRFSGSGSGTDYTLT |
| | | ISSLQPEDFATYYCQQGNTLPWTFGQGTKVEIKGG |
| | | GGSGGGGGGGGSEVQLVESGGGLVQPGGSLRLSCA |
| | | ASGYSFTGYTMNWVRQAPGKGLEWVALINPYKGVS |
| | | TYNQKFKDRFTISVDKSKNTAYLQMNSLRAEDTAV |
| | | YYCARSGYYGDSDWYFDVWGQGTLVTVSSTSGGGG |
| | | SLESGQVLLESNIKVLPTWSTPVQPMALIVLGGVA |
| | | GLLLFIGLGIFFCVRCRHRRRQAERMSQIKRLLSE |
| | | KKTCQCPHRFQKTCSPI |
| 583 | Amino Acid | MALPVTALLLPLALLLHAARPQVQLVQSGAEVKKP |
| | | GSSVKVSCKASGGTFSSYAISWVRQAPGQGLEWMG |
| | | GIIPIFGTANYAQKFQGRVTITADESTSTAYMELS |
| | | SLRSEDTAVYYCARGGYVWGSYRQNSNWFDPWGQG |
| | | TLVTVSSGSTSGSGKPGSGEGSTKGSYVLTQPPSA |
| | | SGTPGQRVTISCSGSSSNIGSNYVYWYQQLPGTAP |
| | | KLLIYRNNQRPSGVPDRFSGSKSGTSASLAISGLR |
| | | SEDEADYYCAAWDDSLSGWVFGGGTKLTVLEQKLI |
| | | SEEDLNPGGGGGSGGGGSGGGGSGGGGSGSMDIQM |
| | | TQSPSSLSASVGDRVTITCRASQDIRNYLNWYQQK |
| | | PGKAPKLLIYYTSRLESGVPSRFSGSGSGTDYTLT |
| | | ISSLQPEDFATYYCQQGNTLPWTFGQGTKVEIKGG |
| | | GGSGGGGSGGGGSEVQLVESGGGLVQPGGSLRLSC |
| | | AASGYSFTGYTMNWVRQAPGKGLEWVALINPYKGV |
| | | STYNQKFKDRFTISVDKSKNTAYLQMNSLRAEDTA |
| | | VYYCARSGYYGDSDWYFDVWGQGTLVTVSSTSGGG |
| | | GSLESGQVLLESNIKVLPTWSTPVQPMALIVLGGV |
| | | AGLLLFIGLGIFFCVRCRHRRRQAERMSQIKRLLS |
| | | EKKTCQCPHRFQKTCSPI |
| 584 | Amino Acid | MALPVTALLLPLALLLHAARPSYVLTQPPSASGTP |
| | | GQRVTISCSGSSSNIGSNYVYWYQQLPGTAPKLLI |
| | | YRNNQRPSGVPDRFSGSKSGTSASLAISGLRSEDE |
| | | ADYYCAAWDDSLSGWVFGGGTKLTVLGSTSGSGKP |
| | | GSGEGSTKGQVQLVQSGAEVKKPGSSVKVSCKASG |
| | | GTFSSYAISWVRQAPGQGLEWMGGIIPIFGTANYA |
| | | QKFQGRVTITADESTSTAYMELSSLRSEDTAVYYC |
| | | ARGGYVWGSYRQNSNWFDPWGQGTLVTVSSEQKLI |
| | | SEEDLNPGGGGGSGGGGSGGGGSGGGGSGSMDIQM |
| | | TQSPSSLSASVGDRVTITCRASQDIRNYLNWYQQK |
| | | PGKAPKLLIYYTSRLESGVPSRFSGSGSGTDYTLT |
| | | ISSLQPEDFATYYCQQGNTLPWTFGQGTKVEIKGG |
| | | GGSGGGGSGGGGSEVQLVESGGGLVQPGGSLRLSC |
| | | AASGYSFTGYTMNWVRQAPGKGLEWVALINPYKGV |
| | | STYNQKFKDRFTISVDKSKNTAYLQMNSLRAEDTA |
| | | VYYCARSGYYGDSDWYFDVWGQGTLVTVSSTSGGG |
| | | GSLESGQVLLESNIKVLPTWSTPVQPMALIVLGGV |
| | | AGLLLFIGLGIFFCVRCRHRRRQAERMSQIKRLLS |
| | | EKKTCQCPHRFQKTCSPI |
| 585 | Amino Acid | MALPVTALLLPLALLLHAARPQVQLVESGAEVKKP |
| | | GSSVKVSCKASGGTFSSYAISWVRQAPGQGLEWMG |
| | | GIIPIFGTANYAQKFQGRVTITADKSTSTAYMELS |
| | | SLRSEDTAVYYCARTHLPYSYGLGGFDYWGQGTLV |
| | | TVSSGSTSGSGKPGSGEGSTKGQSVLTQPPSVSGA |
| | | PGQRVTISCTGSSSNIGAGYDVHWYQQLPGTAPKL |
| | | LIYGNSNRPSGVPDRFSGSKSGTSASLAITGLQAE |
| | | DEADYYCQSYDSSLSGPVVFGGGTKVTVLEQKLIS |
| | | EEDLNPGGGGGSGGGGSGGGGSGGGGSGSMDIQMT |
| | | QSPSSLSASVGDRVTITCRASQDIRNYLNWYQQKP |
| | | GKAPKLLIYYTSRLESGVPSRFSGSGSGTDYTLTI |
| | | SSLQPEDFATYYCQQGNTLPWTFGQGTKVEIKGGG |
| | | GSGGGGSGGGGSEVQLVESGGGLVQPGGSLRLSCA |
| | | ASGYSFTGYTMNWVRQAPGKGLEWVALINPYKGVS |
| | | TYNQKFKDRFTISVDKSKNTAYLQMNSLRAEDTAV |
| | | YYCARSGYYGDSDWYFDVWGQGTLVTVSSTSGGGG |
| | | SLESGQVLLESNIKVLPTWSTPVQPMALIVLGGVA |
| | | GLLLFIGLGIFFCVRCRHRRRQAERMSQIKRLLSE |
| | | KKTCQCPHRFQKTCSPI |
| 586 | Amino Acid | MALPVTALLLPLALLLHAARPQSVLTQPPSVSGAP |
| | | GQRVTISCTGSSSNIGAGYDVHWYQQLPGTAPKLL |
| | | IYGNSNRPSGVPDRFSGSKSGTSASLAITGLQAED |
| | | EADYYCQSYDSSLSGPVVFGGGTKVTVLGSTSGSG |
| | | KPGSGEGSTKGQVQLVESGAEVKKPGSSVKVSCKA |
| | | SGGTFSSYAISWVRQAPGQGLEWMGGIIPIFGTAN |
| | | YAQKFQGRVTITADKSTSTAYMELSSLRSEDTAVY |
| | | YCARTHLPYSYGLGGFDYWGQGTLVTVSSEQKLIS |
| | | EEDLNPGGGGGSGGGGSGGGGSGGGGSGSMDIQMT |
| | | QSPSSLSASVGDRVTITCRASQDIRNYLNWYQQKP |
| | | GKAPKLLIYYTSRLESGVPSRFSGSGSGTDYTLTI |
| | | SSLQPEDFATYYCQQGNTLPWTFGQGTKVEIKGGG |
| | | GSGGGGSGGGGSEVQLVESGGGLVQPGGSLRLSCA |
| | | ASGYSFTGYTMNWVRQAPGKGLEWVALINPYKGVS |
| | | TYNQKFKDRFTISVDKSKNTAYLQMNSLRAEDTAV |
| | | YYCARSGYYGDSDWYFDVWGQGTLVTVSSTSGGGG |
| | | SLESGQVLLESNIKVLPTWSTPVQPMALIVLGGVA |
| | | GLLLFIGLGIFFCVRCRHRRRQAERMSQIKRLLSE |
| | | KKTCQCPHRFQKTCSPI |
| 587 | Amino Acid | MALPVTALLLPLALLLHAARPQVQLVQSGAEVKKP |
| | | GASVKVSCKASGYTFTSYGISWVRQAPGQGLEWMG |
| | | WISAYNGNTNYAQKLQGRVTMTTDTSTSTAYMELR |
| | | SLRSDDTAVYYCARDIIRYCSSTSCYRGIDYWGQG |
| | | TLVTVSSGSTSGSGKPGSGEGSTKGQSALTQPASV |
| | | SGSPGQSITISCTGTSSDVGGYNYVSWYQQHPGKA |
| | | PKLMIYDVSNRPSGVSNRFSGSKSGNTASLTISGL |
| | | QAEDEADYYCSSYTSSSPHVVSGGGTKLTVLEQKL |
| | | ISEEDLNPGGGGGSGGGGSGGGGSGGGGSGSMDIQ |
| | | MTQSPSSLSASVGDRVTITCRASQDIRNYLNWYQQ |
| | | KPGKAPKLLIYYTSRLESGVPSRFSGSGSGTDYTL |
| | | TISSLQPEDFATYYCQQGNTLPWTFGQGTKVEIKG |
| | | GGGSGGGGSGGGGSEVQLVESGGGLVQPGGSLRLS |
| | | CAASGYSFTGYTMNWVRQAPGKGLEWVALINPYKG |
| | | VSTYNQKFKDRFTISVDKSKNTAYLQMNSLRAEDT |
| | | AVYYCARSGYYGDSDWYFDVWGQGTLVTVSSTSGG |
| | | GGSLESGQVLLESNIKVLPTWSTPVQPMALIVLGG |
| | | VAGLLLFIGLGIFFCVRCRHRRRQAERMSQIKRLL |
| | | SEKKTCQCPHRFQKTCSPI |
| 588 | Amino Acid | MALPVTALLLPLALLLHAARPQSALTQPASVSGSP |
| | | GQSITISCTGTSSDVGGYNYVSWYQQHPGKAPKLM |
| | | IYDVSNRPSGVSNRFSGSKSGNTASLTISGLQAED |
| | | EADYYCSSYTSSSPHVVSGGGTKLTVLGSTSGSGK |
| | | PGSGEGSTKGQVQLVQSGAEVKKPGASVKVSCKAS |
| | | GYTFTSYGISWVRQAPGQGLEWMGWISAYNGNTNY |
| | | AQKLQGRVTMTTDTSTSTAYMELRSLRSDDTAVYY |
| | | CARDIIRYCSSTSCYRGIDYWGQGTLVTVSSEQKL |
| | | ISEEDLNPGGGGGSGGGGSGGGGSGGGGSGSMDIQ |
| | | MTQSPSSLSASVGDRVTITCRASQDIRNYLNWYQQ |
| | | KPGKAPKLLIYYTSRLESGVPSRFSGSGSGTDYTL |
| | | TISSLQPEDFATYYCQQGNTLPWTFGQGTKVEIKG |
| | | GGGSGGGGSGGGGSEVQLVESGGGLVQPGGSLRLS |
| | | CAASGYSFTGYTMNWVRQAPGKGLEWVALINPYKG |
| | | VSTYNQKFKDRFTISVDKSKNTAYLQMNSLRAEDT |
| | | AVYYCARSGYYGDSDWYFDVWGQGTLVTVSSTSGG |
| | | GGSLESGQVLLESNIKVLPTWSTPVQPMALIVLGG |
| | | VAGLLLFIGLGIFFCVRCRHRRRQAERMSQIKRLL |
| | | SEKKTCQCPHRFQKTCSPI |
| 589 | Amino Acid | MALPVTALLLPLALLLHAARPQVQLVESGAEVKKP |
| | | GSSVKVSCKASGGTFSSYAISWVRQAPGQGLEWMG |
| | | GIIPIFGTANYAQKFQGRVTITADESTSTAYMELS |
| | | SLRSEDTAVYYCARPLYAPRFGYGMDVWGQGTLVT |
| | | VSSGSTSGSGKPGSGEGSTKGQSVLTQPPSASGTP |
| | | GQRVTISCSGSSSNIGSNYVYWYQQLPGTAPKLLI |
| | | YRNNQRPSGVPDRFSGSKSGTSASLAISGLRSEDE |
| | | ADYYCAAWDDSLSGWVFGGGTQLTVLEQKLISEED |
| | | LNPGGGGGSGGGGSGGGGSGGGGSGSMDIQMTQSP |
| | | SSLSASVGDRVTITCRASQDIRNYLNWYQQKPGKA |
| | | PKLLIYYTSRLESGVPSRFSGSGSGTDYTLTISSL |
| | | QPEDFATYYCQQGNTLPWTFGQGTKVEIKGGGGSG |
| | | GGGGGGGSEVQLVESGGGLVQPGGSLRLSCAASGY |
| | | SFTGYTMNWVRQAPGKGLEWVALINPYKGVSTYNQ |
| | | KFKDRFTISVDKSKNTAYLQMNSLRAEDTAVYYCA |
| | | RSGYYGDSDWYFDVWGQGTLVTVSSTSGGGGSLES |
| | | GQVLLESNIKVLPTWSTPVQPMALIVLGGVAGLLL |
| | | FIGLGIFFCVRCRHRRRQAERMSQIKRLLSEKKTC |
| | | QCPHRFQKTCSPI |
| 590 | Amino Acid | MALPVTALLLPLALLLHAARPQSVLTQPPSASGTP |
| | | GQRVTISCSGSSSNIGSNYVYWYQQLPGTAPKLLI |
| | | YRNNQRPSGVPDRFSGSKSGTSASLAISGLRSEDE |
| | | ADYYCAAWDDSLSGWVFGGGTQLTVLGSTSGSGKP |
| | | GSGEGSTKGQVQLVESGAEVKKPGSSVKVSCKASG |
| | | GTFSSYAISWVRQAPGQGLEWMGGIIPIFGTANYA |
| | | QKFQGRVTITADESTSTAYMELSSLRSEDTAVYYC |
| | | ARPLYAPRFGYGMDVWGQGTLVTVSSEQKLISEED |
| | | LNPGGGGGSGGGGSGGGGSGGGGSGSMDIQMTQSP |
| | | SSLSASVGDRVTITCRASQDIRNYLNWYQQKPGKA |
| | | PKLLIYYTSRLESGVPSRFSGSGSGTDYTLTISSL |
| | | QPEDFATYYCQQGNTLPWTFGQGTKVEIKG |
| | | GGGSGGGGSGGGGSEVQLVESGGGLVQP |
| | | GGSLRLSCAASGYSFTGYTMNWVRQAPGKGLEWVA |
| | | LINPYKGVSTYNQKFKDRFTISVDKSK |
| | | NTAYLQMNSLRAEDTAVYYCARSGYYGDSDWYFDV |
| | | WGQGTLVTVSSTSGGGGSLESGQVLL |
| | | ESNIKVLPTWSTPVQPMALIVLGGVAGLLLFIGLG |
| | | IFFCVRCRHRRRQAERMSQIKRLLSEKKTC |
| | | QCPHRFQKTCSPI |
| 591 | Nucleotide | ATGGCTCTGCCTGTGACAGCTCTGTTGCTGCCTCT |
| | | GGCTCTGCTGCTGCATGCTGCTAGACCTCAGGTGC |
| | | AGCTGGTGCAGTCTGGGGCTGAGGTGAAGAAGCCT |
| | | GGGTCCTCGGTGAAGGTCTCCTGCAAGGCTTCTGG |
| | | AGGCACCTTCAGCAGCTATGCTATCAGCTGGGTGC |
| | | GACAGGCCCCTGGACAAGGGCTTGAGTGGATGGGA |
| | | GGGATCATCCCTATCTTTGGTACAGCAAACTACGC |
| | | ACAGAAGTTCCAGGGCAGAGTCACGATTACCGCGG |
| | | ACGAATCCACGAGCACAGCCTACATGGAGCTGAGC |
| | | AGCCTGAGGAGCGAGGACACGGCCGTGTATTACTG |
| | | TGCGAGAGACATATTACGATTGAGCGTGTCCTCGG |
| | | GTATGGACGTCTGGGGCCAAGGGACCCTGGTCACC |
| | | GTGTCCTCAGGGTCAACCTCTGGTAGCGGTAAGCC |
| | | TGGCTCCGGCGAAGGCTCCACAAAGGGTCAGTCTG |
| | | TGTTGACGCAGCCGCCCTCAGCGTCTGGGACCCCC |
| | | GGGCAGAGGGTCACCATCTCTTGTTCTGGAGGCAG |
| | | CTCCAACATCGGAAGTAATTATGTATACTGGTACC |
| | | AGCAGCTCCCAGGAACGGCCCCCAAACTCCTCATC |
| | | TATAGGAATAATCAGCGGCCCTCAGGGGTCCCTGA |
| | | CCGATTCTCTGGCTCCAAGTCTGGCACCTCAGCCT |
| | | CCCTGGCCATCAGTGGGCTCCGGTCCGAGGATGAG |
| | | GCTGATTATTACTGTGCAGCATGGGATGACAGCCT |
| | | GAGTGGTCATGTGGTATTCGGCGGAGGGACCAAGC |
| | | TGACCGTCCTAGAGCAGAAACTGATCAGCGAGGAA |
| | | GATCTGAATCCTGGCGGAGGCGGAGGAAGTGGTGG |
| | | CGGAGGTTCTGGTGGCGGTGGATCAGGCGGTGGCG |
| | | GATCTGGATCTATGGATATCCAGATGACCCAGTCC |
| | | CCGAGCTCCCTGTCCGCCTCTGTGGGCGATAGGGT |
| | | CACCATCACCTGCCGTGCCAGTCAGGACATCCGTA |
| | | ATTATCTGAACTGGTATCAACAGAAACCAGGAAAA |
| | | GCTCCGAAACTACTGATTTACTATACCTCCCGCCT |
| | | GGAGTCTGGAGTCCCTTCTCGCTTCTCTGGTTCTG |
| | | GTTCTGGGACGGATTACACTCTGACCATCAGCAGT |
| | | CTGCAACCGGAAGACTTCGCAACTTATTACTGTCA |
| | | GCAAGGTAATACTCTGCCGTGGACGTTCGGACAGG |
| | | GCACCAAGGTGGAGATCAAAGGCGGCGGCGGAAGT |
| | | GGAGGAGGAGGCTCAGGCGGAGGAGGGAGCGAGGT |
| | | TCAGCTGGTGGAGTCTGGCGGTGGCCTGGTGCAGC |
| | | CAGGGGGCTCACTCCGTTTGTCCTGTGCAGCTTCT |
| | | GGCTACTCCTTTACCGGCTACACTATGAACTGGGT |
| | | GCGTCAGGCCCCAGGTAAGGGCCTGGAATGGGTTG |
| | | CACTGATTAATCCTACCAAAGGTGTTAGTACCTAC |
| | | AACCAGAAGTTCAAGGACCGTTTCACTATAAGCGT |
| | | AGATAAATCCAAAAACACAGCCTACCTGCAAATGA |
| | | ACAGCCTGCGTGCTGAGGACACTGCCGTCTATTAT |
| | | TGTGCTAGAAGCGGATACTACGGCGATAGTGACTG |
| | | GTATTTTGACGTGTGGGGTCAAGGAACCCTGGTCA |
| | | CCGTCTCCTCGACATCTGGCGGCGGAGGATCTCTG |
| | | GAATCTGGACAGGTGCTGCTGGAAAGCAACATCAA |
| | | GGTGCTGCCCACCTGGTCTACCCCAGTTCAGCCTA |
| | | TGGCTCTGATTGTGCTTGGCGGAGTTGCCGGCCTG |
| | | CTGCTCTTTATCGGCCTGGGCATCTTCTTTTGCGT |
| | | GCGGTGCAGACATCGGCGGAGACAGGCTGAGAGAA |
| | | TGAGCCAGATCAAGCGGCTGCTGAGCGAGAAGAAA |
| | | ACCTGTCAGTGCCCTCACCGGTTCCAGAAAACATG |
| | | CAGCCCCATC |
| 592 | Nucleotide | ATGGCTCTGCCTGTGACAGCTCTGTTGCTGCCTCT |
| | | GGCTCTGCTGCTGCATGCTGCTAGACCTCAGGTGC |
| | | AGCTGGTGCAGTCTGGGGCTGAGGTGAAGAAGCCT |
| | | GGGTCCTCGGTGAAGGTCTCCTGCAAGGCTTCTGG |
| | | AGGCACCTTCAGCAGCTATGCTATCAGCTGGGTGC |
| | | GACAGGCCCCTGGACAAGGGCTTGAGTGGATGGGA |
| | | GGGATCATCCCTATCTTTGGTACAGCAAACTACGC |
| | | ACAGAAGTTCCAGGGCAGAGTCACGATTACCGCGG |
| | | ACGAATCCACGAGCACAGCCTACATGGAGCTGAGC |
| | | AGCCTGAGGAGCGAGGACACGGCCGTGTATTACTG |
| | | TGCGAGAGACATATTACGATTGAGCGTGTCCTCGG |
| | | GTATGGACGTCTGGGGCCAAGGGACCCTGGTCACC |
| | | GTGTCCTCAGGGTCAACCTCTGGTAGCGGTAAGCC |
| | | TGGCTCCGGCGAAGGCTCCACAAAGGGTCAGTCTG |
| | | TGCTGACTCAGCCACCCTCAGCGTCTGGGACCCCC |
| | | GGGCAGAGGGTCACCATCTCTTGTTCTGGAAGCAG |
| | | CTCCAACATCGGAAGTAATTATGTATACTGGTACC |
| | | AGCAGCTCCCAGGAACGGCCCCCAAACTCCTCATC |
| | | TATAGGAATAATCAGCGGCCCTCAGGGGTCCCTGA |
| | | CCGACTCTCTGGCTCCAAGTCTGGCACCTCAGCCT |
| | | CCCTGGCCATCAGTGGGCTCCGGTCCGAGGATGAG |
| | | GCTGATTATTACTGTGCAGCATGGGATGACAGCCT |
| | | GAGTGCTGTGGTATTCGGCGGAGGGACCAAGCTGA |
| | | CCGTCCTAGAGCAGAAACTGATCAGCGAGGAAGAT |
| | | CTGAATCCTGGCGGAGGCGGAGGAAGTGGTGGCGG |
| | | AGGTTCTGGTGGCGGTGGATCAGGCGGTGGCGGAT |
| | | CTGGATCTATGGATATCCAGATGACCCAGTCCCCG |
| | | AGCTCCCTGTCCGCCTCTGTGGGCGATAGGGTCAC |
| | | CATCACCTGCCGTGCCAGTCAGGACATCCGTAATT |
| | | ATCTGAACTGGTATCAACAGAAACCAGGAAAAGCT |
| | | CCGAAACTACTGATTTACTATACCTCCCGCCTGGA |
| | | GTCTGGAGTCCCTTCTCGCTTCTCTGGTTCTGGTT |
| | | CTGGGACGGATTACACTCTGACCATCAGCAGTCTG |
| | | CAACCGGAAGACTTCGCAACTTATTACTGTCAGCA |
| | | AGGTAATACTCTGCCGTGGACGTTCGGACAGGGCA |
| | | CCAAGGTGGAGATCAAAGGCGGCGGCGGAAGTGGA |
| | | GGAGGAGGCTCAGGCGGAGGAGGGAGCGAGGTTCA |
| | | GCTGGTGGAGTCTGGCGGTGGCCTGGTGCAGCCAG |
| | | GGGGCTCACTCCGTTTGTCCTGTGCAGCTTCTGGC |
| | | TACTCCTTTACCGGCTACACTATGAACTGGGTGCG |
| | | TCAGGCCCCAGGTAAGGGCCTGGAATGGGTTGCAC |
| | | TGATTAATCCTACCAAAGGTGTTAGTACCTACAAC |
| | | CAGAAGTTCAAGGACCGTTTCACTATAAGCGTAGA |
| | | TAAATCCAAAAACACAGCCTACCTGCAAATGAACA |
| | | GCCTGCGTGCTGAGGACACTGCCGTCTATTATTGT |
| | | GCTAGAAGCGGATACTACGGCGATAGTGACTGGTA |
| | | TTTTGACGTGTGGGGTCAAGGAACCCTGGTCACCG |
| | | TCTCCTCGACATCTGGCGGCGGAGGATCTCTGGAA |
| | | TCTGGACAGGTGCTGCTGGAAAGCAACATCAAGGT |
| | | GCTGCCCACCTGGTCTACCCCAGTTCAGCCTATGG |
| | | CTCTGATTGTGCTTGGCGGAGTTGCCGGCCTGCTG |
| | | CTCTTTATCGGCCTGGGCATCTTCTTTTGCGTGCG |
| | | GTGCAGACATCGGCGGAGACAGGCTGAGAGAATGA |
| | | GCCAGATCAAGCGGCTGCTGAGCGAGAAGAAAACC |
| | | TGTCAGTGCCCTCACCGGTTCCAGAAAACATGCAG |
| | | CCCCATC |
| 593 | Nucleotide | ATGGCTCTGCCTGTGACAGCTCTGTTGCTGCCTCT |
| | | GGCTCTGCTGCTGCATGCTGCTAGACCTCAGGTGC |
| | | AGCTGCAGGAGTCGGGGGGAGGCGTGGTCCAGCCT |
| | | GGGAGGTCCCTGAGACTCTCCTGTGCAGCCTCTGG |
| | | ATTCACCCTCAGTAGCTATGGCATGCACTGGGTCC |
| | | GCCAGGCTCCAGGCAAGGGGCTGGAGTGGGTGGCA |
| | | GTTATATCATATGATGGAAGTAATAAATACTATGC |
| | | AGACTCCGTGAAGGGCCGATTCACCATCTCCAGAG |
| | | ACAATTCCAAGAACACGCTGTATCTGCAAATGAAC |
| | | AGCCTGAGAGCTGAGGACACGGCTGTGTATTACTG |
| | | TGCGAAGAGCGGCTGGAGATATTACTACTACTACG |
| | | GTATGGACGTCTGGGGCCAAGGGACCCTGGTCACC |
| | | GTGTCCTCAGGGTCAACCTCTGGTAGCGGTAAGCC |
| | | TGGCTCCGGCGAAGGCTCCACAAAGGGTCAGTCTG |
| | | TGTTGACGCAGCCGCCCTCAGTGTCTGGGGCCCCA |
| | | GGGCAGAGGGTCACCATCTCCTGCACTGGGAGCAG |
| | | CTCCAACATCGGGGCAGGTTATGATGTACACTGGT |
| | | ACCAGCAGCTTCCAGGAACAGCCCCCAAACTCCTC |
| | | ATCTATGGTAACAGCAATCGGCCCTCAGGGGTCCC |
| | | TGACCGATTCTCTGGCTCCAAGTCTGGCACCTCAG |
| | | CCTCCCTGGCCATCACTGGGCTCCAGGCTGAGGAT |
| | | GAGGCTGATTATTACTGCCAGTCCTATGACAGCAG |
| | | CCTGAGTGGTTCGGTATTCGGCGGAGGGACCAAGC |
| | | TGACCGTCCTAGAGCAGAAACTGATCAGCGAGGAA |
| | | GATCTGAATCCTGGCGGAGGCGGAGGAAGTGGTGG |
| | | CGGAGGTTCTGGTGGCGGTGGATCAGGCGGTGGCG |
| | | GATCTGGATCTATGGATATCCAGATGACCCAGTCC |
| | | CCGAGCTCCCTGTCCGCCTCTGTGGGCGATAGGGT |
| | | CACCATCACCTGCCGTGCCAGTCAGGACATCCGTA |
| | | ATTATCTGAACTGGTATCAACAGAAACCAGGAAAA |
| | | GCTCCGAAACTACTGATTTACTATACCTCCCGCCT |
| | | GGAGTCTGGAGTCCCTTCTCGCTTCTCTGGTTCTG |
| | | GTTCTGGGACGGATTACACTCTGACCATCAGCAGT |
| | | CTGCAACCGGAAGACTTCGCAACTTATTACTGTCA |
| | | GCAAGGTAATACTCTGCCGTGGACGTTCGGACAGG |
| | | GCACCAAGGTGGAGATCAAAGGCGGCGGCGGAAGT |
| | | GGAGGAGGAGGCTCAGGCGGAGGAGGGAGCGAGGT |
| | | TCAGCTGGTGGAGTCTGGCGGTGGCCTGGTGCAGC |
| | | CAGGGGGCTCACTCCGTTTGTCCTGTGCAGCTTCT |
| | | GGCTACTCCTTTACCGGCTACACTATGAACTGGGT |
| | | GCGTCAGGCCCCAGGTAAGGGCCTGGAATGGGTTG |
| | | CACTGATTAATCCTACCAAAGGTGTTAGTACCTAC |
| | | AACCAGAAGTTCAAGGACCGTTTCACTATAAGCGT |
| | | AGATAAATCCAAAAACACAGCCTACCTGCAAATGA |
| | | ACAGCCTGCGTGCTGAGGACACTGCCGTCTATTAT |
| | | TGTGCTAGAAGCGGATACTACGGCGATAGTGACTG |
| | | GTATTTTGACGTGTGGGGTCAAGGAACCCTGGTCA |
| | | CCGTCTCCTCGACATCTGGCGGCGGAGGATCTCTG |
| | | GAATCTGGACAGGTGCTGCTGGAAAGCAACATCAA |
| | | GGTGCTGCCCACCTGGTCTACCCCAGTTCAGCCTA |
| | | TGGCTCTGATTGTGCTTGGCGGAGTTGCCGGCCTG |
| | | CTGCTCTTTATCGGCCTGGGCATCTTCTTTTGCGT |
| | | GCGGTGCAGACATCGGCGGAGACAGGCTGAGAGAA |
| | | TGAGCCAGATCAAGCGGCTGCTGAGCGAGAAGAAA |
| | | ACCTGTCAGTGCCCTCACCGGTTCCAGAAAACATG |
| | | CAGCCCCATC |
| 594 | Nucleotide | ATGGCTCTGCCTGTGACAGCTCTGTTGCTGCCTCT |
| | | GGCTCTGCTGCTGCATGCTGCTAGACCTCAGGTGC |
| | | AGCTGGTGCAGTCTGGGGCTGAGGTGAAGAAGCCT |
| | | GGGTCCTCGGTGAAGGTCTCCTGCAAGGCTTCTGG |
| | | AGGCACCTTCAGCAGCTATGCTATCAGCTGGGTGC |
| | | GACAGGCCCCTGGACAAGGGCTTGAGTGGATGGGA |
| | | GGGATCATCCCTATCTTTGGTACAGCAAACTACGC |
| | | ACAGAAGTTCCAGGGCAGAGTCACGATTACCGCGG |
| | | ACGAATCCACGAGCACAGCCTACATGGAGCTGAGC |
| | | AGCCTGAGGAGCGAGGACACGGCCGTGTATTACTG |
| | | TGCGAGAGACATATTACGATTGAGCGTGTCCTCGG |
| | | GTATGGACGTCTGGGGCCAAGGGACAATGGTCACC |
| | | GTGTCTTCAGGGTCAACCTCTGGTAGCGGTAAGCC |
| | | TGGCTCCGGCGAAGGCTCCACAAAGGGTCAGTCTG |
| | | TGCTGACTCAGCCACCCTCAGCGTCTGGGACCCCC |
| | | GGGCAGAGGGTCACCATCTCTTGTTCTGGAAGCAG |
| | | CTCCAACATCGGAAGTAATTATGTATACTGGTACC |
| | | AGCAGCTCCCAGGAACGGCCCCCAAACTCCTCATC |
| | | TATAGGAATAATCAGCGGCCCTCAGGGGTCCCTGA |
| | | CCGATTCTCTGGCTCCAAGTCTGGCACCTCAGCCT |
| | | CCCTGGCCATCAGTGGGCTCCGGTCCGAGGATGAG |
| | | GCTGATTATTACTGTGCAGCATGGGATGACAGCCT |
| | | GAGTGGCCCCTCCGTGGTATTCGGCGGAGGGACCA |
| | | AGCTGACCGTCCTAGAGCAGAAACTGATCAGCGAG |
| | | GAAGATCTGAATCCTGGCGGAGGCGGAGGAAGTGG |
| | | TGGCGGAGGTTCTGGTGGCGGTGGATCAGGCGGTG |
| | | GCGGATCTGGATCTATGGATATCCAGATGACCCAG |
| | | TCCCCGAGCTCCCTGTCCGCCTCTGTGGGCGATAG |
| | | GGTCACCATCACCTGCCGTGCCAGTCAGGACATCC |
| | | GTAATTATCTGAACTGGTATCAACAGAAACCAGGA |
| | | AAAGCTCCGAAACTACTGATTTACTATACCTCCCG |
| | | CCTGGAGTATGGCTCTGCCTGTGACAGCTCTGTTG |
| | | CTGCCTCTGGCTCTGCTGCTGCATGCTGCTAGACC |
| | | TCAGGTGCAGCTGCAGGAGTCGGGGGGAGGCGTGG |
| | | TCCAGCCTGGGAGGTCCCTGAGACTCTCCTGTGCA |
| | | GCCTCTGGATTCACCCTCAGTAGCTATGGCATGCA |
| | | CTGGGTCCGCCAGGCTCCAGGCAAGGGGCTGGAGT |
| | | GGGTGGCAGTTATATCATATGATGGAAGTAATAAA |
| | | TACTATGCAGACTCCGTGAAGGGCCGATTCACCAT |
| | | CTCCAGAGACAATTCCAAGAACACGCTGTATCTGC |
| | | AAATGAACAGCCTGAGAGCTGAGGACACGGCTGTG |
| | | TATTACTGTGCGAAGAGCGGCTGGAGATATTACTA |
| | | CTACTACGGTATGGACGTCTGGGGCCAAGGGACCC |
| | | TGGTCACCGTGTCCTCAGGGTCAACCTCTGGTAGC |
| | | GGTAAGCCTGGCTCCGGCGAAGGCTCCACAAAGGG |
| | | TCAGTCTGTGTTGACGCAGCCGCCCTCAGTGTCTG |
| | | GGGCCCCAGGGCAGAGGGTCACCATCTCCTGCACT |
| | | GGGAGCAGCTCCAACATCGGGGCAGGTTATGATGT |
| | | ACACTGGTACCAGCAGCTTCCAGGAACAGCCCCCA |
| | | AACTCCTCATCTATGGTAACAGCAATCGGCCCTCA |
| | | GGGGTCCCTGACCGATTCTCTGGCTCCAAGTCTGG |
| | | CACCTCAGCCTCCCTGGCCATCACTGGGCTCCAGG |
| | | CTGAGGATGAGGCTGATTATTACTGCCAGTCCTAT |
| | | GACAGCAGCCTGAGTGGTTCGGTATTCGGCGGAGG |
| | | GACCAAGCTGACCGTCCTAGAGCAGAAACTGATCA |
| | | GCGAGGAAGATCTGAATCCTGGCGGAGGCGGAGGA |
| | | AGTGGTGGCGGAGGTTCTGGTGGCGGTGGATCAGG |
| | | CGGTGGCGGATCTGGATCTATGGATATCCAGATGA |
| | | CCCAGTCCCCGAGCTCCCTGTCCGCCTCTGTGGGC |
| | | GATAGGGTCACCATCACCTGCCGTGCCAGTCAGGA |
| | | CATCCGTAATTATCTGAACTGGTATCAACAGAAAC |
| | | CAGGAAAAGCTCCGAAACTACTGATTTACTATACC |
| | | TCCCGCCTGGAGTCTGGAGTCCCTTCTCGCTTCTC |
| | | TGGTTCTGGTTCTGGGACGGATTACACTCTGACCA |
| | | TCAGCAGTCTGCAACCGGAAGACTTCGCAACTTAT |
| | | TACTGTCAGCAAGGTAATACTCTGCCGTGGACGTT |
| | | CGGACAGGGCACCAAGGTGGAGATCAAAGGCGGCG |
| | | GCGGAAGTGGAGGAGGAGGCTCAGGCGGAGGAGGG |
| | | AGCGAGGTTCAGCTGGTGGAGTCTGGCGGTGGCCT |
| | | GGTGCAGCCAGGGGGCTCACTCCGTTTGTCCTGTG |
| | | CAGCTTCTGGCTACTCCTTTACCGGCTACACTATG |
| | | AACTGGGTGCGTCAGGCCCCAGGTAAGGGCCTGGA |
| | | ATGGGTTGCACTGATTAATCCTACCAAAGGTGTTA |
| | | GTACCTACAACCAGAAGTTCAAGGACCGTTTCACT |
| | | ATAAGCGTAGATAAATCCAAAAACACAGCCTACCT |
| | | GCAAATGAACAGCCTGCGTGCTGAGGACACTGCCG |
| | | TCTATTATTGTGCTAGAAGCGGATACTACGGCGAT |
| | | AGTGACTGGTATTTTGACGTGTGGGGTCAAGGAAC |
| | | CCTGGTCACCGTCTCCTCGACATCTGGCGGCGGAG |
| | | GATCTCTGGAATCTGGACAGGTGCTGCTGGAAAGC |
| | | AACATCAAGGTGCTGCCCACCTGGTCTACCCCAGT |
| | | TCAGCCTATGGCTCTGATTGTGCTTGGCGGAGTTG |
| | | CCGGCCTGCTGCTCTTTATCGGCCTGGGCATCTTC |
| | | TTTTGCGTGCGGTGCAGACATCGGCGGAGACAGGC |
| | | TGAGAGAATGAGCCAGATCAAGCGGCTGCTGAGCG |
| | | AGAAGAAAACCTGTCAGTGCCCTCACCGGTTCCAG |
| | | AAAACATGCAGCCCCATC |
| 595 | Nucleotide | ATGGCTCTGCCTGTGACAGCTCTGTTGCTGCCTCT |
| | | GGCTCTGCTGCTGCATGCTGCTAGACCTCAGGTGC |
| | | AGCTGGTGCAGTCTGGGGCTGAGGTGAAGAAGCCT |
| | | GGGGCCTCAGTGAAGGTCTCCTGCAAGGCTTCTGG |
| | | TTACACCTTTACCAGCTATGGTATCAGCTGGGTGC |
| | | GACAGGCCCCTGGACAAGGGCTTGAGTGGATGGGA |
| | | TGGATCGGCGCTTACAATGGTAACACAAACTATGC |
| | | ACAGAAGCTCCAGGGCAGAGTCACCATGACCACAG |
| | | ACACATCCACGAGCACAGCCTACATGGAGCTGAGG |
| | | AGCCTGAGGAGCGACGACACGGCCGTGTATTACTG |
| | | TGCGAGGGACCTGAGGCGGTATAGCAGCAGCTGGG |
| | | ACGGCCCCGGGTACTGGGGCCAGGGAACCCTGGTC |
| | | ACCGTGTCCTCAGGGTCAACCTCTGGTAGCGGTAA |
| | | GCCTGGCTCCGGCGAAGGCTCCACAAAGGGTCAGT |
| | | CTGCCCTGACTCAGCCTGCCTCCGTGTCTGGGTCT |
| | | CCTGGACAGTCGATCACCATCTCCTGCACTGGAAC |
| | | CAGCAGTGACGTTGGTGGTTATAACTATGTCTCCT |
| | | GGTACCAACAACACCCAGGCAAAGCCCCCAAACTC |
| | | ATGATTTATGATGTCAGTAATCGGCCCTCAGGGGT |
| | | TTCTAATCGCTTCTCTGGCTCCAAGTCTGGCAACA |
| | | CGGCCTCCCTGACCATCTCTGGGCTCCAGGCTGAG |
| | | GACGAGGCTGATTATTACTGCAGCTCATATACAAG |
| | | CAGCAGCACTCGGGTCTTCGGAACTGGGACCAAGC |
| | | TGACCGTCCTAGAGCAGAAACTGATCAGCGAGGAA |
| | | GATCTGAATCCTGGCGGAGGCGGAGGAAGTGGTGG |
| | | CGGAGGTTCTGGTGGCGGTGGATCAGGCGGTGGCG |
| | | GATCTGGATCTATGGATATCCAGATGACCCAGTCC |
| | | CCGAGCTCCCTGTCCGCCTCTGTGGGCGATAGGGT |
| | | CACCATCACCTGCCGTGCCAGTCAGGACATCCGTA |
| | | ATTATCTGAACTGGTATCAACAGAAACCAGGAAAA |
| | | GCTCCGAAACTACTGATTTACTATACCTCCCGCCT |
| | | GGAGTCTGGAGTCCCTTCTCGCTTCTCTGGTTCTG |
| | | GTTCTGGGACGGATTACACTCTGACCATCAGCAGT |
| | | CTGCAACCGGAAGACTTCGCAACTTATTACTGTCA |
| | | GCAAGGTAATACTCTGCCGTGGACGTTCGGACAGG |
| | | GCACCAAGGTGGAGATCAAAGGCGGCGGCGGAAGT |
| | | GGAGGAGGAGGCTCAGGCGGAGGAGGGAGCGAGGT |
| | | TCAGCTGGTGGAGTCTGGCGGTGGCCTGGTGCAGC |
| | | CAGGGGGCTCACTCCGTTTGTCCTGTGCAGCTTCT |
| | | GGCTACTCCTTTACCGGCTACACTATGAACTGGGT |
| | | GCGTCAGGCCCCAGGTAAGGGCCTGGAATGGGTTG |
| | | CACTGATTAATCCTACCAAAGGTGTTAGTACCTAC |
| | | AACCAGAAGTTCAAGGACCGTTTCACTATAAGCGT |
| | | AGATAAATCCAAAAACACAGCCTACCTGCAAATGA |
| | | ACAGCCTGCGTGCTGAGGACACTGCCGTCTATTAT |
| | | TGTGCTAGAAGCGGATACTACGGCGATAGTGACTG |
| | | GTATTTTGACGTGTGGGGTCAAGGAACCCTGGTCA |
| | | CCGTCTCCTCGACATCTGGCGGCGGAGGATCTCTG |
| | | GAATCTGGACAGGTGCTGCTGGAAAGCAACATCAA |
| | | GGTGCTGCCCACCTGGTCTACCCCAGTTCAGCCTA |
| | | TGGCTCTGATTGTGCTTGGCGGAGTTGCCGGCCTG |
| | | CTGCTCTTTATCGGCCTGGGCATCTTCTTTTGCGT |
| | | GCGGTGCAGACATCGGCGGAGACAGGCTGAGAGAA |
| | | TGAGCCAGATCAAGCGGCTGCTGAGCGAGAAGAAA |
| | | ACCTGTCAGTGCCCTCACCGGTTCCAGAAAACATG |
| | | CAGCCCCATC |
| 596 | Nucleotide | ATGGCTCTGCCTGTGACAGCTCTGTTGCTGCCTCT |
| | | GGCTCTGCTGCTGCATGCTGCTAGACCTCAGGTGC |
| | | AGCTGGTGCAGTCTGGGGCTGAGGTGAAGAAGCCT |
| | | GGGTCCTCGGTGAAGGTCTCCTGCAAGGCTTCTGG |
| | | AGGCACCTTCAGCAGCTATGCTATCAGCTGGGTGC |
| | | GACAGGCCCCTGGACAAGGGCTTGAGTGGATGGGA |
| | | GGGATCATCCCTATCTTTGGTACAGCAAACTACGC |
| | | ACAGAAGTTCCAGGGCAGAGTCACGATTACCGCGG |
| | | ACGAATCCACGAGCACAGCCTACATGGAGCTGAGC |
| | | AGCCTGAGGAGCGAGGACACGGCCGTGTATTACTG |
| | | TGCGAGAGACATATTACGATTGAGCGTGTCCTCGG |
| | | GTATGGACGTCTGGGGCCAAGGGACCCTGGTCACC |
| | | GTGTCCTCAGGGTCAACCTCTGGTAGCGGTAAGCC |
| | | TGGCTCCGGCGAAGGCTCCACAAAGGGTTCCTATG |
| | | TGCTGACTCAGCCACCCTCAGCGTCTGGGACCCCC |
| | | GGGCAGAGGGTCACCATCTCTTGTTCTGGAAGCAG |
| | | CTCCAACATCGGAGGTAATTATGTATACTGGTACC |
| | | AGCAGCTCCCAGGAACGGCCCCCAAACTCCTCATC |
| | | TATAGGAATAATCAGCGGCCCTCAGGGGTCCCTGA |
| | | CCGATTCTCTGGCTCCAAGTCTGGCACCTCAGCCT |
| | | CCCTGGCCATCAGTGGGCTCCGGTCCGAGGATGAG |
| | | GCTGATTATTACTGTGCAGCATGGGATGACAGCCT |
| | | GAGTGGTTGGGTGTTCGGCGGAGGGACCAAGCTGA |
| | | CCGTCCTAGAGCAGAAACTGATCAGCGAGGAAGAT |
| | | CTGAATCCTGGCGGAGGCGGAGGAAGTGGTGGCGG |
| | | AGGTTCTGGTGGCGGTGGATCAGGCGGTGGCGGAT |
| | | CTGGATCTATGGATATCCAGATGACCCAGTCCCCG |
| | | AGCTCCCTGTCCGCCTCTGTGGGCGATAGGGTCAC |
| | | CATCACCTGCCGTGCCAGTCAGGACATCCGTAATT |
| | | ATCTGAACTGGTATCAACAGAAACCAGGAAAAGCT |
| | | CCGAAACTACTGATTTACTATACCTCCCGCCTGGA |
| | | GTCTGGAGTCCCTTCTCGCTTCTCTGGTTCTGGTT |
| | | CTGGGACGGATTACACTCTGACCATCAGCAGTCTG |
| | | CAACCGGAAGACTTCGCAACTTATTACTGTCAGCA |
| | | AGGTAATACTCTGCCGTGGACGTTCGGACAGGGCA |
| | | CCAAGGTGGAGATCAAAGGCGGCGGCGGAAGTGGA |
| | | GGAGGAGGCTCAGGCGGAGGAGGGAGCGAGGTTCA |
| | | GCTGGTGGAGTCTGGCGGTGGCCTGGTGCAGCCAG |
| | | GGGGCTCACTCCGTTTGTCCTGTGCAGCTTCTGGC |
| | | TACTCCTTTACCGGCTACACTATGAACTGGGTGCG |
| | | TCAGGCCCCAGGTAAGGGCCTGGAATGGGTTGCAC |
| | | TGATTAATCCTACCAAAGGTGTTAGTACCTACAAC |
| | | CAGAAGTTCAAGGACCGTTTCACTATAAGCGTAGA |
| | | TAAATCCAAAAACACAGCCTACCTGCAAATGAACA |
| | | GCCTGCGTGCTGAGGACACTGCCGTCTATTATTGT |
| | | GCTAGAAGCGGATACTACGGCGATAGTGACTGGTA |
| | | TTTTGACGTGTGGGGTCAAGGAACCCTGGTCACCG |
| | | TCTCCTCGACATCTGGCGGCGGAGGATCTCTGGAA |
| | | TCTGGACAGGTGCTGCTGGAAAGCAACATCAAGGT |
| | | GCTGCCCACCTGGTCTACCCCAGTTCAGCCTATGG |
| | | CTCTGATTGTGCTTGGCGGAGTTGCCGGCCTGCTG |
| | | CTCTTTATCGGCCTGGGCATCTTCTTTTGCGTGCG |
| | | GTGCAGACATCGGCGGAGACAGGCTGAGAGAATGA |
| | | GCCAGATCAAGCGGCTGCTGAGCGAGAAGAAAACC |
| | | TGTCAGTGCCCTCACCGGTTCCAGAAAACATGCAG |
| | | CCCCATC |
| 597 | Nucleotide | ATGGCTCTGCCTGTGACAGCTCTGTTGCTGCCTCT |
| | | GGCTCTGCTGCTGCATGCTGCTAGACCTCAGGTTC |
| | | AGCTGGTGCAGTCTGGGGCTGAGGTGAAGAAGCCT |
| | | GGGTCCTCGGTGAAGGTCTCCTGCAAGGCTTCTGG |
| | | AGGCACCTTCAGCAGCTATGCTATCAGCTGGGTGC |
| | | GACAGGCCCCTGGACAAGGGCTTGAGTGGATGGGA |
| | | GGGATCATCCCTATCTTTGGTACAGCAAACTACGC |
| | | ACAGAAGTTCCAGGGCAGAGTCACGATTACCGCGG |
| | | ACAAATCCACGAGCACAGCCTACATGGAGCTGAGC |
| | | AGCCTGAGGAGCGAGGACACGGCCGTGTATTACTG |
| | | TGCGAGAGATGGGGGTCGATACAGCTATGGGAGGT |
| | | CCTTTGACTACTGGGGCCAGGGAACCCTGGTCACC |
| | | GTGTCCTCAGGGTCAACCTCTGGTAGCGGTAAGCC |
| | | TGGCTCCGGCGAAGGCTCCACAAAGGGTCAGTCTG |
| | | TGTTGACGCAGCCGCCCTCAGTGTCTGGGGCCCCA |
| | | GGGCAGAGGGTCACCATCTCCTGCACTGGGAGCAG |
| | | CTCCAACATCGGGGCAGGTTATGATGTACACTGGT |
| | | ACCAGCAGCTTCCAGGAACAGCCCCCAAACTCCTC |
| | | ATCTATGGTAACAGCAATCGGCCCTCAGGGGTCCC |
| | | TGACCGATTCTCCGGCTCCAAGTCTGGCACCTCAG |
| | | CCTCCCTGGCCATCACTGGGCTCCAGGCTGAGGAT |
| | | GAGGCTGATTATTACTGCCAGTCCTATGACAGCAG |
| | | CCTGAGTGGTCCCGTGGTATTCGGCGGAGGGACCA |
| | | AGCTGACCGTCCTAGAGCAGAAACTGATCAGCGAG |
| | | GAAGATCTGAATCCTGGCGGAGGCGGAGGAAGTGG |
| | | TGGCGGAGGTTCTGGTGGCGGTGGATCAGGCGGTG |
| | | GCGGATCTGGATCTATGGATATCCAGATGACCCAG |
| | | TCCCCGAGCTCCCTGTCCGCCTCTGTGGGCGATAG |
| | | GGTCACCATCACCTGCCGTGCCAGTCAGGACATCC |
| | | GTAATTATCTGAACTGGTATCAACAGAAACCAGGA |
| | | AAAGCTCCGAAACTACTGATTTACTATACCTCCCG |
| | | CCTGGAGTCTGGAGTCCCTTCTCGCTTCTCTGGTT |
| | | CTGGTTCTGGGACGGATTACACTCTGACCATCAGC |
| | | AGTCTGCAACCGGAAGACTTCGCAACTTATTACTG |
| | | TCAGCAAGGTAATACTCTGCCGTGGACGTTCGGAC |
| | | AGGGCACCAAGGTGGAGATCAAAGGCGGCGGCGGA |
| | | AGTGGAGGAGGAGGCTCAGGCGGAGGAGGGAGCGA |
| | | GGTTCAGCTGGTGGAGTCTGGCGGTGGCCTGGTGC |
| | | AGCCAGGGGGCTCACTCCGTTTGTCCTGTGCAGCT |
| | | TCTGGCTACTCCTTTACCGGCTACACTATGAACTG |
| | | GGTGCGTCAGGCCCCAGGTAAGGGCCTGGAATGGG |
| | | TTGCACTGATTAATCCTACCAAAGGTGTTAGTACC |
| | | TACAACCAGAAGTTCAAGGACCGTTTCACTATAAG |
| | | CGTAGATAAATCCAAAAACACAGCCTACCTGCAAA |
| | | TGAACAGCCTGCGTGCTGAGGACACTGCCGTCTAT |
| | | TATTGTGCTAGAAGCGGATACTACGGCGATAGTGA |
| | | CTGGTATTTTGACGTGTGGGGTCAAGGAACCCTGG |
| | | TCACCGTCTCCTCGACATCTGGCGGCGGAGGATCT |
| | | CTGGAATCTGGACAGGTGCTGCTGGAAAGCAACAT |
| | | CAAGGTGCTGCCCACCTGGTCTACCCCAGTTCAGC |
| | | CTATGGCTCTGATTGTGCTTGGCGGAGTTGCCGGC |
| | | CTGCTGCTCTTTATCGGCCTGGGCATCTTCTTTTG |
| | | CGTGCGGTGCAGACATCGGCGGAGACAGGCTGAGA |
| | | GAATGAGCCAGATCAAGCGGCTGCTGAGCGAGAAG |
| | | AAAACCTGTCAGTGCCCTCACCGGTTCCAGAAAAC |
| | | ATGCAGCCCCATC |
| 598 | Nucleotide | ATGGCTCTGCCTGTGACAGCTCTGTTGCTGCCTCT |
| | | GGCTCTGCTGCTGCATGCTGCTAGACCTCAGGTTC |
| | | AGCTGGTGCAGTCTGGGGCTGAGGTGAAGAAGCCT |
| | | GGGTCCTCGGTGAAGGTCTCCTGCAAGGCTTCTGG |
| | | AGGCACCTTCAGCAGCTATGCTATCAGCTGGGTGC |
| | | GACAGGCCCCTGGACAAGGGCTTGAGTGGATGGGA |
| | | GGGATCATCCCTATCTTTGGTACAGCAAACTACGC |
| | | ACAGAAGTTCCAGGGCAGAGTCACGATTACCGCGG |
| | | ACGAATCCACGAGCACAGCCTACATGGAGCTGAGC |
| | | AGCCTGAGGAGCGAGGACACGGCCGTGTATTACTG |
| | | TGCGAGACCATTACGGCCCCTACACTACTACGGTA |
| | | TGGACGTCTGGGGCCAAGGGACCCTGGTCACCGTG |
| | | TCCTCAGGGTCAACCTCTGGTAGCGGTAAGCCTGG |
| | | CTCCGGCGAAGGCTCCACAAAGGGTCAGTCTGTGC |
| | | TGACGCAGCCGCCCTCAGCGTCTGGGACCCCCGGG |
| | | CAGAGGGTCACCATCTCTTGTTCTGGAAGCAGCTC |
| | | CAACATCGGAAGTAATTATGTATACTGGTACCAGC |
| | | AGCTCCCAGGAACGGCCCCCAAACTCCTCATCTAT |
| | | AGGAATAATCAGCGGCCCTCAGGGGTCCCTGACCG |
| | | ATTCTCTGGCTCCAAGTCTGGCACCTCAGCCTCCC |
| | | TGGCCATCAGTGGGCTCCGGTCCGAGGATGAGGCT |
| | | GATTATTACTGTGCAGCATGGGATGACAGCCTGAC |
| | | CGAGGGGGTGTTCGGCGGAGGGACCAAGCTGACCG |
| | | TCCTAGAGCAGAAACTGATCAGCGAGGAAGATCTG |
| | | AATCCTGGCGGAGGCGGAGGAAGTGGTGGCGGAGG |
| | | TTCTGGTGGCGGTGGATCAGGCGGTGGCGGATCTG |
| | | GATCTATGGATATCCAGATGACCCAGTCCCCGAGC |
| | | TCCCTGTCCGCCTCTGTGGGCGATAGGGTCACCAT |
| | | CACCTGCCGTGCCAGTCAGGACATCCGTAATTATC |
| | | TGAACTGGTATCAACAGAAACCAGGAAAAGCTCCG |
| | | AAACTACTGATTTACTATACCTCCCGCCTGGAGTC |
| | | TGGAGTCCCTTCTCGCTTCTCTGGTTCTGGTTCTG |
| | | GGACGGATTACACTCTGACCATCAGCAGTCTGCAA |
| | | CCGGAAGACTTCGCAACTTATTACTGTCAGCAAGG |
| | | TAATACTCTGCCGTGGACGTTCGGACAGGGCACCA |
| | | AGGTGGAGATCAAAGGCGGCGGCGGAAGTGGAGGA |
| | | GGAGGCTCAGGCGGAGGAGGGAGCGAGGTTCAGCT |
| | | GGTGGAGTCTGGCGGTGGCCTGGTGCAGCCAGGGG |
| | | GCTCACTCCGTTTGTCCTGTGCAGCTTCTGGCTAC |
| | | TCCTTTACCGGCTACACTATGAACTGGGTGCGTCA |
| | | GGCCCCAGGTAAGGGCCTGGAATGGGTTGCACTGA |
| | | TTAATCCTACCAAAGGTGTTAGTACCTACAACCAG |
| | | AAGTTCAAGGACCGTTTCACTATAAGCGTAGATAA |
| | | ATCCAAAAACACAGCCTACCTGCAAATGAACAGCC |
| | | TGCGTGCTGAGGACACTGCCGTCTATTATTGTGCT |
| | | AGAAGCGGATACTACGGCGATAGTGACTGGTATTT |
| | | TGACGTGTGGGGTCAAGGAACCCTGGTCACCGTCT |
| | | CCTCGACATCTGGCGGCGGAGGATCTCTGGAATCT |
| | | GGACAGGTGCTGCTGGAAAGCAACATCAAGGTGCT |
| | | GCCCACCTGGTCTACCCCAGTTCAGCCTATGGCTC |
| | | TGATTGTGCTTGGCGGAGTTGCCGGCCTGCTGCTC |
| | | TTTATCGGCCTGGGCATCTTCTTTTGCGTGCGGTG |
| | | CAGACATCGGCGGAGACAGGCTGAGAGAATGAGCC |
| | | AGATCAAGCGGCTGCTGAGCGAGAAGAAAACCTGT |
| | | CAGTGCCCTCACCGGTTCCAGAAAACATGCAGCCC |
| | | CATC |
| 599 | Nucleotide | ATGGCTCTGCCTGTGACAGCTCTGTTGCTGCCTCT |
| | | GGCTCTGCTGCTGCATGCTGCTAGACCTCAGGTGC |
| | | AGCTGGTGGAGTCTGGGGGAGGCGTGGTCCAGCCT |
| | | GGGAGGTCCCTGAGACTCTCCTGTGCAGCGTCTGG |
| | | ATTCACCTTCAGTAGCTATGGCATGCACTGGGTCC |
| | | GCCGGGCTCCAGGCAAGGGGCTGGAGTGGGTGGCA |
| | | GTTATATCATATGATGGAAGTAATAAATACTATGC |
| | | AGACTCCGTGAAGGGCCGATTCACCATCTCCAGAG |
| | | ACAATTCCAAGAACACGCTGTATCTGCAAATGAAC |
| | | AGCCTGAGAGCTGAGGACACGGCTGTGTATTACTG |
| | | TGCGAAAGATGGGGGCGACAGTGGGAGTCTTGACT |
| | | ACTGGGGCCAGGGAACCCTGGTCACCGTGTCCTCA |
| | | GGGTCAACCTCTGGTAGCGGTAAGCCTGGCTCCGG |
| | | CGAAGGCTCCACAAAGGGTGACATCGTGATGACCC |
| | | AGTCTCCAGACTCCCTGGCTGTGTCTCTGGGCGAG |
| | | AGGGCCACCATCAACTGCAAGTCCAGCCAGAGTGT |
| | | TTTATACAGCTCCAACAATAAGAACTACTTAGCTT |
| | | GGTACCAGCAGAAACCAGGACAGCCTCCTAAGCTG |
| | | CTCATTTACTGGGCATCTACCCGGGAATCCGGGGT |
| | | CCCTGACCGATTCAGTGGCAGCGGGTCTGGGACAG |
| | | ATTTCACTCTCACCATCAGCAGCCTGCAGGCTGAA |
| | | GATGTGGCAGTTTATTACTGTCAGCAATATTATAG |
| | | TACTCCGCTCACTTTCGGCGGAGGGACCAAGCTGG |
| | | AGATCAAAGAGCAGAAACTGATCAGCGAGGAAGAT |
| | | CTGAATCCTGGCGGAGGCGGAGGAAGTGGTGGCGG |
| | | AGGTTCTGGTGGCGGTGGATCAGGCGGTGGCGGAT |
| | | CTGGATCTATGGATATCCAGATGACCCAGTCCCCG |
| | | AGCTCCCTGTCCGCCTCTGTGGGCGATAGGGTCAC |
| | | CATCACCTGCCGTGCCAGTCAGGACATCCGTAATT |
| | | ATCTGAACTGGTATCAACAGAAACCAGGAAAAGCT |
| | | CCGAAACTACTGATTTACTATACCTCCCGCCTGGA |
| | | GTCTGGAGTCCCTTCTCGCTTCTCTGGTTCTGGTT |
| | | CTGGGACGGATTACACTCTGACCATCAGCAGTCTG |
| | | CAACCGGAAGACTTCGCAACTTATTACTGTCAGCA |
| | | AGGTAATACTCTGCCGTGGACGTTCGGACAGGGCA |
| | | CCAAGGTGGAGATCAAAGGCGGCGGCGGAAGTGGA |
| | | GGAGGAGGCTCAGGCGGAGGAGGGAGCGAGGTTCA |
| | | GCTGGTGGAGTCTGGCGGTGGCCTGGTGCAGCCAG |
| | | GGGGCTCACTCCGTTTGTCCTGTGCAGCTTCTGGC |
| | | TACTCCTTTACCGGCTACACTATGAACTGGGTGCG |
| | | TCAGGCCCCAGGTAAGGGCCTGGAATGGGTTGCAC |
| | | TGATTAATCCTACCAAAGGTGTTAGTACCTACAAC |
| | | CAGAAGTTCAAGGACCGTTTCACTATAAGCGTAGA |
| | | TAAATCCAAAAACACAGCCTACCTGCAAATGAACA |
| | | GCCTGCGTGCTGAGGACACTGCCGTCTATTATTGT |
| | | GCTAGAAGCGGATACTACGGCGATAGTGACTGGTA |
| | | TTTTGACGTGTGGGGTCAAGGAACCCTGGTCACCG |
| | | TCTCCTCGACATCTGGCGGCGGAGGATCTCTGGAA |
| | | TCTGGACAGGTGCTGCTGGAAAGCAACATCAAGGT |
| | | GCTGCCCACCTGGTCTACCCCAGTTCAGCCTATGG |
| | | CTCTGATTGTGCTTGGCGGAGTTGCCGGCCTGCTG |
| | | CTCTTTATCGGCCTGGGCATCTTCTTTTGCGTGCG |
| | | GTGCAGACATCGGCGGAGACAGGCTGAGAGAATGA |
| | | GCCAGATCAAGCGGCTGCTGAGCGAGAAGAAAACC |
| | | TGTCAGTGCCCTCACCGGTTCCAGAAAACATGCAG |
| | | CCCCATC |
| 600 | Nucleotide | ATGGCTCTGCCTGTGACAGCTCTGTTGCTGCCTCT |
| | | GGCTCTGCTGCTGCATGCTGCTAGACCTGAGGTGC |
| | | AGCTGTTGGAGTCTGGGGGAGGCTTGGTCCAGCCT |
| | | GGGGGGTCCCTGAGACTCTCCTGTGCAGCCTCTGG |
| | | ATTCACCTTTAGTAGCTATTGGATGAGCTGGGTCC |
| | | GCCAGGCTCCAGGGAAGGGGCTGGAGTGGGTGGCC |
| | | AACATAAAGCAAGATGGAAGTGAGAAATACTATGT |
| | | GGACTCTGTGAAGGGCCGATTCACCATCTCCAGAG |
| | | ACAACGCCAAGAACTCACTGTATCTGCAAATGAAC |
| | | AGCCTGAGAGCCGAGGACACGGCTGTGTATTACTG |
| | | TGCGAGACCGGCGGGCCAGCTGCTCTACGGTATGG |
| | | ACGTCTGGGGCCAAGGGACCCTGGTCACCGTGTCC |
| | | TCAGGGTCAACCTCTGGTAGCGGTAAGCCTGGCTC |
| | | CGGCGAAGGCTCCACAAAGGGTTCCTATGTGCTGA |
| | | CTCAGCCACCCTCGGTGTCAGTGTCCCCAGGACAG |
| | | ACGGCCAGGATCACCTGCTCTGGAGATGCATTGCC |
| | | AAAGCAATATGCTTATTGGTACCAGCAGAAGCCAG |
| | | GCCAGGCCCCTGTGCTGGTGATATATAAAGACAGT |
| | | GAGAGGCCCTCAGGGATCCCTGAGCGATTCTCTGG |
| | | CTCCAGCTCAGGGACAACAGTCACGTTGACCATCA |
| | | GTGGAGTCCAGGCAGAAGACGAGGCTGACTATTAC |
| | | TGTCAATCAGCAGACAGCAGTGGTACTTGGGTGTT |
| | | CGGCGGAGGCACCAAGCTGACCGTCCTCGAGCAGA |
| | | AACTGATCAGCGAGGAAGATCTGAATCCTGGCGGA |
| | | GGCGGAGGAAGTGGTGGCGGAGGTTCTGGTGGCGG |
| | | TGGATCAGGCGGTGGCGGATCTGGATCTATGGATA |
| | | TCCAGATGACCCAGTCCCCGAGCTCCCTGTCCGCC |
| | | TCTGTGGGCGATAGGGTCACCATCACCTGCCGTGC |
| | | CAGTCAGGACATCCGTAATTATCTGAACTGGTATC |
| | | AACAGAAACCAGGAAAAGCTCCGAAACTACTGATT |
| | | TACTATACCTCCCGCCTGGAGTCTGGAGTCCCTTC |
| | | TCGCTTCTCTGGTTCTGGTTCTGGGACGGATTACA |
| | | CTCTGACCATCAGCAGTCTGCAACCGGAAGACTTC |
| | | GCAACTTATTACTGTCAGCAAGGTAATACTCTGCC |
| | | GTGGACGTTCGGACAGGGCACCAAGGTGGAGATCA |
| | | AAGGCGGCGGCGGAAGTGGAGGAGGAGGCTCAGGC |
| | | GGAGGAGGGAGCGAGGTTCAGCTGGTGGAGTCTGG |
| | | CGGTGGCCTGGTGCAGCCAGGGGGCTCACTCCGTT |
| | | TGTCCTGTGCAGCTTCTGGCTACTCCTTTACCGGC |
| | | TACACTATGAACTGGGTGCGTCAGGCCCCAGGTAA |
| | | GGGCCTGGAATGGGTTGCACTGATTAATCCTACCA |
| | | AAGGTGTTAGTACCTACAACCAGAAGTTCAAGGAC |
| | | CGTTTCACTATAAGCGTAGATAAATCCAAAAACAC |
| | | AGCCTACCTGCAAATGAACAGCCTGCGTGCTGAGG |
| | | ACACTGCCGTCTATTATTGTGCTAGAAGCGGATAC |
| | | TACGGCGATAGTGACTGGTATTTTGACGTGTGGGG |
| | | TCAAGGAACCCTGGTCACCGTCTCCTCGACATCTG |
| | | GCGGCGGAGGATCTCTGGAATCTGGACAGGTGCTG |
| | | CTGGAAAGCAACATCAAGGTGCTGCCCACCTGGTC |
| | | TACCCCAGTTCAGCCTATGGCTCTGATTGTGCTTG |
| | | GCGGAGTTGCCGGCCTGCTGCTCTTTATCGGCCTG |
| | | GGCATCTTCTTTTGCGTGCGGTGCAGACATCGGCG |
| | | GAGACAGGCTGAGAGAATGAGCCAGATCAAGCGGC |
| | | TGCTGAGCGAGAAGAAAACCTGTCAGTGCCCTCAC |
| | | CGGTTCCAGAAAACATGCAGCCCCATC |
| 601 | Nucleotide | ATGGCTCTGCCTGTGACAGCTCTGTTGCTGCCTCT |
| | | GGCTCTGCTGCTGCATGCTGCTAGACCTGAGGTGC |
| | | AGCTGTTGGAGTCTGGGGGAGGCGTGGTCCAGCCT |
| | | GGGAGGTCCCTGAGACTCTCCTGTGCAGCCTCTGG |
| | | ATTCACCTTCAGTAGCTATGGCATGCACTGGGTCC |
| | | GCCAGGCTCCAGGCAAGGGGCTGGAGTGGGTGGCA |
| | | GTTATATCATATGATGGAAGTAATAAATACTATGC |
| | | AGACTCCGTGAAGGGCCGATTCACCATCTCCAGAG |
| | | ACAATTCCAAGAACACGCTGTATCTGCAAATGAAC |
| | | AGCCTGAGAGCTGAGGACACGGCTGTGTATTACTG |
| | | TGCGAAAGATGCCGCGGATATGGGGGCCTTTGACT |
| | | ACTGGGGCCAGGGAACCCTGGTCACCGTGTCCTCA |
| | | GGGTCAACCTCTGGTAGCGGTAAGCCTGGCTCCGG |
| | | CGAAGGCTCCACAAAGGGTGACATCCAGATGACCC |
| | | AGTCTCCAGACTCCCTGGCTGTGTCTCTGGGCGAG |
| | | AGGGCCACCATGAACTGCAAGTCCAGCCAGAGTGT |
| | | TTTATACAGCTCCAACAATAAGAACTACTTAGCTT |
| | | GGTACCAGCAGAAACCAGGACAGCCTCCTAAGCTG |
| | | CTCATTTACTGGGCATCTGCCCGGGAATCTGGGGT |
| | | CCCTGACCGATTCAGTGGCAGCGGGTCTGGGACAG |
| | | ATTTCACTCTCACCATCAGCAGCCTGCAGGCTGAA |
| | | GATGTGGCAGTTTATTACTGTCAGCAATATTATAG |
| | | TACTCCTCTCACTTTTGGCCAGGGGACCAAGGTGG |
| | | AAATCAAAGAGCAGAAACTGATCAGCGAGGAAGAT |
| | | CTGAATCCTGGCGGAGGCGGAGGAAGTGGTGGCGG |
| | | AGGTTCTGGTGGCGGTGGATCAGGCGGTGGCGGAT |
| | | CTGGATCTATGGATATCCAGATGACCCAGTCCCCG |
| | | AGCTCCCTGTCCGCCTCTGTGGGCGATAGGGTCAC |
| | | CATCACCTGCCGTGCCAGTCAGGACATCCGTAATT |
| | | ATCTGAACTGGTATCAACAGAAACCAGGAAAAGCT |
| | | CCGAAACTACTGATTTACTATACCTCCCGCCTGGA |
| | | GTCTGGAGTCCCTTCTCGCTTCTCTGGTTCTGGTT |
| | | CTGGGACGGATTACACTCTGACCATCAGCAGTCTG |
| | | CAACCGGAAGACTTCGCAACTTATTACTGTCAGCA |
| | | AGGTAATACTCTGCCGTGGACGTTCGGACAGGGCA |
| | | CCAAGGTGGAGATCAAAGGCGGCGGCGGAAGTGGA |
| | | GGAGGAGGCTCAGGCGGAGGAGGGAGCGAGGTTCA |
| | | GCTGGTGGAGTCTGGCGGTGGCCTGGTGCAGCCAG |
| | | GGGGCTCACTCCGTTTGTCCTGTGCAGCTTCTGGC |
| | | TACTCCTTTACCGGCTACACTATGAACTGGGTGCG |
| | | TCAGGCCCCAGGTAAGGGCCTGGAATGGGTTGCAC |
| | | TGATTAATCCTACCAAAGGTGTTAGTACCTACAAC |
| | | CAGAAGTTCAAGGACCGTTTCACTATAAGCGTAGA |
| | | TAAATCCAAAAACACAGCCTACCTGCAAATGAACA |
| | | GCCTGCGTGCTGAGGACACTGCCGTCTATTATTGT |
| | | GCTAGAAGCGGATACTACGGCGATAGTGACTGGTA |
| | | TTTTGACGTGTGGGGTCAAGGAACCCTGGTCACCG |
| | | TCTCCTCGACATCTGGCGGCGGAGGATCTCTGGAA |
| | | TCTGGACAGGTGCTGCTGGAAAGCAACATCAAGGT |
| | | GCTGCCCACCTGGTCTACCCCAGTTCAGCCTATGG |
| | | CTCTGATTGTGCTTGGCGGAGTTGCCGGCCTGCTG |
| | | CTCTTTATCGGCCTGGGCATCTTCTTTTGCGTGCG |
| | | GTGCAGACATCGGCGGAGACAGGCTGAGAGAATGA |
| | | GCCAGATCAAGCGGCTGCTGAGCGAGAAGAAAACC |
| | | TGTCAGTGCCCTCACCGGTTCCAGAAAACATGCAG |
| | | CCCCATC |
| 602 | Nucleotide | ATGGCTCTGCCTGTGACAGCTCTGTTGCTGCCTCT |
| | | GGCTCTGCTGCTGCATGCTGCTAGACCTGAGGTGC |
| | | AGCTGTTGGAGTCTGGGGGAGGCCTGGTCAAGCCT |
| | | GGGGGGTCCCTGAGACTCTCCTGTGCAGCCTCTGG |
| | | ATTCACCTTCAGTAGCTATAGCATGAACTGGGTCC |
| | | GCCAGGCTCCAGGGAAGGGGCTGGAGTGGGTCTCA |
| | | GCTATTAGTGGTAGTGGTGGTAGCACATACTACGC |
| | | AGACTCCGTGAAGGGCCGGTTCACCATCTCCAGAG |
| | | ACAATTCCAAGAACACGCTGTATCTGCAAATGAAC |
| | | AGCCTGAGAGCCGAGGACACGGCTGTGTATTACTG |
| | | TGCGAGAGCACGTGGATACAGCTATGGCTCTGATG |
| | | CTTTTGATATCTGGGGCCAAGGGACAATGGTCACC |
| | | GTGTCTTCAGGGTCAACCTCTGGTAGCGGTAAGCC |
| | | TGGCTCCGGCGAAGGCTCCACAAAGGGTCAGTCTG |
| | | TGCTGACTCAGCCACCCTCAGCGTCTGGGACCCCC |
| | | GGGCAGAGGGTCACCATCTCTTGTTCTGGAAGCAG |
| | | CTCCAACATCGGAAGTAATTATGTATACTGGTACC |
| | | AGCAGCTCCCAGGAACGGCCCCCAAACTCCTCATC |
| | | TATAGGAATAATCAGCGGCCCTCAGGGGTCCCTGA |
| | | CCGATTCTCTGGCTCCAAGTCTGGCACCTCAGCCT |
| | | CCCTGGCCATCAGTGGGCTCCGGTCCGAGGATGAG |
| | | GCTGATTATTACTGTGCAGCATGGGATGACAGCCT |
| | | GAGTGGCGTGGTATTCGGCGGAGGGACCAAGCTGA |
| | | CCGTCCTAGAGCAGAAACTGATCAGCGAGGAAGAT |
| | | CTGAATCCTGGCGGAGGCGGAGGAAGTGGTGGCGG |
| | | AGGTTCTGGTGGCGGTGGATCAGGCGGTGGCGGAT |
| | | CTGGATCTATGGATATCCAGATGACCCAGTCCCCG |
| | | AGCTCCCTGTCCGCCTCTGTGGGCGATAGGGTCAC |
| | | CATCACCTGCCGTGCCAGTCAGGACATCCGTAATT |
| | | ATCTGAACTGGTATCAACAGAAACCAGGAAAAGCT |
| | | CCGAAACTACTGATTTACTATACCTCCCGCCTGGA |
| | | GTCTGGAGTCCCTTCTCGCTTCTCTGGTTCTGGTT |
| | | CTGGGACGGATTACACTCTGACCATCAGCAGTCTG |
| | | CAACCGGAAGACTTCGCAACTTATTACTGTCAGCA |
| | | AGGTAATACTCTGCCGTGGACGTTCGGACAGGGCA |
| | | CCAAGGTGGAGATCAAAGGCGGCGGCGGAAGTGGA |
| | | GGAGGAGGCTCAGGCGGAGGAGGGAGCGAGGTTCA |
| | | GCTGGTGGAGTCTGGCGGTGGCCTGGTGCAGCCAG |
| | | GGGGCTCACTCCGTTTGTCCTGTGCAGCTTCTGGC |
| | | TACTCCTTTACCGGCTACACTATGAACTGGGTGCG |
| | | TCAGGCCCCAGGTAAGGGCCTGGAATGGGTTGCAC |
| | | TGATTAATCCTACCAAAGGTGTTAGTACCTACAAC |
| | | CAGAAGTTCAAGGACCGTTTCACTATAAGCGTAGA |
| | | TAAATCCAAAAACACAGCCTACCTGCAAATGAACA |
| | | GCCTGCGTGCTGAGGACACTGCCGTCTATTATTGT |
| | | GCTAGAAGCGGATACTACGGCGATAGTGACTGGTA |
| | | TTTTGACGTGTGGGGTCAAGGAACCCTGGTCACCG |
| | | TCTCCTCGACATCTGGCGGCGGAGGATCTCTGGAA |
| | | TCTGGACAGGTGCTGCTGGAAAGCAACATCAAGGT |
| | | GCTGCCCACCTGGTCTACCCCAGTTCAGCCTATGG |
| | | CTCTGATTGTGCTTGGCGGAGTTGCCGGCCTGCTG |
| | | CTCTTTATCGGCCTGGGCATCTTCTTTTGCGTGCG |
| | | GTGCAGACATCGGCGGAGACAGGCTGAGAGAATGA |
| | | GCCAGATCAAGCGGCTGCTGAGCGAGAAGAAAACC |
| | | TGTCAGTGCCCTCACCGGTTCCAGAAAACATGCAG |
| | | CCCCATC |
| 603 | Nucleotide | ATGGCTCTGCCTGTGACAGCTCTGTTGCTGCCTCT |
| | | GGCTCTGCTGCTGCATGCTGCTAGACCTCAGGTTC |
| | | AGCTGGTGCAGTCTGGGGGAGGCGTGGTCCAGCCT |
| | | GGGAGGTCCCTGAGACTCTCCTGTGCAGCCTCTGG |
| | | ATTCACCTTCAGTAGCTATGGCATGCACTGGGTCC |
| | | GCCAGGCTCCAGGCAAGGGGCTGGAGTGGGTGGCA |
| | | GTTATATCATATGATGGAAGTAATAAATACTATGC |
| | | AGACTCCGTGAAGGGCCGATTCACCATCTCCAGAG |
| | | ACAATTCCAAGAACACGCTGTATCTGCAAATGAAC |
| | | AGCCTGAGAGCTGAGGACACGGCTGTGTATTACTG |
| | | TGCGAAAGGTGTCCCCCGGTACTACTACTACTACG |
| | | GTATGGACGTCTGGGGCCAAGGGACAATGGTCACC |
| | | GTGTCTTCAGGGTCAACCTCTGGTAGCGGTAAGCC |
| | | TGGCTCCGGCGAAGGCTCCACAAAGGGTCAGTCTG |
| | | TGTTGACGCAGCCGCCCTCAGTGTCTGGGGCCCCA |
| | | GGGCAGAGGGTCACCATCTCCTGCACTGGGAGCAG |
| | | CTCCAACATCGGGGCAGGTTATGATGTACACTGGT |
| | | ACCAGCAGCTTCCAGGAACAGCCCCCAAACTCCTC |
| | | ATCTATGGTAACAGCAATCGGCCCTCAGGGGTCCC |
| | | TGACCGATTCTCTGGCTCCAAGTCTGGCACCTCAG |
| | | CCTCCCTGGCCATCACTGGGCTCCAGGCTGAGGAT |
| | | GAGGCTGATTATTACTGCCAGTCCTATGACAGCAG |
| | | CCTGAGTGGTTCGGTGTTCGGCGGAGGGACCAAGC |
| | | TGACCGTCCTAGAGCAGAAACTGATCAGCGAGGAA |
| | | GATCTGAATCCTGGCGGAGGCGGAGGAAGTGGTGG |
| | | CGGAGGTTCTGGTGGCGGTGGATCAGGCGGTGGCG |
| | | GATCTGGATCTATGGATATCCAGATGACCCAGTCC |
| | | CCGAGCTCCCTGTCCGCCTCTGTGGGCGATAGGGT |
| | | CACCATCACCTGCCGTGCCAGTCAGGACATCCGTA |
| | | ATTATCTGAACTGGTATCAACAGAAACCAGGAAAA |
| | | GCTCCGAAACTACTGATTTACTATACCTCCCGCCT |
| | | GGAGTCTGGAGTCCCTTCTCGCTTCTCTGGTTCTG |
| | | GTTCTGGGACGGATTACACTCTGACCATCAGCAGT |
| | | CTGCAACCGGAAGACTTCGCAACTTATTACTGTCA |
| | | GCAAGGTAATACTCTGCCGTGGACGTTCGGACAGG |
| | | GCACCAAGGTGGAGATCAAAGGCGGCGGCGGAAGT |
| | | GGAGGAGGAGGCTCAGGCGGAGGAGGGAGCGAGGT |
| | | TCAGCTGGTGGAGTCTGGCGGTGGCCTGGTGCAGC |
| | | CAGGGGGCTCACTCCGTTTGTCCTGTGCAGCTTCT |
| | | GGCTACTCCTTTACCGGCTACACTATGAACTGGGT |
| | | GCGTCAGGCCCCAGGTAAGGGCCTGGAATGGGTTG |
| | | CACTGATTAATCCTACCAAAGGTGTTAGTACCTAC |
| | | AACCAGAAGTTCAAGGACCGTTTCACTATAAGCGT |
| | | AGATAAATCCAAAAACACAGCCTACCTGCAAATGA |
| | | ACAGCCTGCGTGCTGAGGACACTGCCGTCTATTAT |
| | | TGTGCTAGAAGCGGATACTACGGCGATAGTGACTG |
| | | GTATTTTGACGTGTGGGGTCAAGGAACCCTGGTCA |
| | | CCGTCTCCTCGACATCTGGCGGCGGAGGATCTCTG |
| | | GAATCTGGACAGGTGCTGCTGGAAAGCAACATCAA |
| | | GGTGCTGCCCACCTGGTCTACCCCAGTTCAGCCTA |
| | | TGGCTCTGATTGTGCTTGGCGGAGTTGCCGGCCTG |
| | | CTGCTCTTTATCGGCCTGGGCATCTTCTTTTGCGT |
| | | GCGGTGCAGACATCGGCGGAGACAGGCTGAGAGAA |
| | | TGAGCCAGATCAAGCGGCTGCTGAGCGAGAAGAAA |
| | | ACCTGTCAGTGCCCTCACCGGTTCCAGAAAACATG |
| | | CAGCCCCATC |
| 604 | Nucleotide | ATGGCTCTGCCTGTGACAGCTCTGTTGCTGCCTCT |
| | | GGCTCTGCTGCTGCATGCTGCTAGACCTGAGGTGC |
| | | AGCTGGTGCAGTCTGGGGCTGAGGTGAAGAAGCCT |
| | | GGGTCCTCGGTGAAGGTCTCCTGCAAGGCTTCCGG |
| | | AGGCACCTTCAGCAGCTATGCTATCAGCTGGGTGC |
| | | GACAGGCCCCTGGACAAGGGCTTGAGTGGATGGGA |
| | | GGGATCATCCCTATCTTTGGTACAGCAAACTACGC |
| | | ACAGAAGTTCCAGGGCAGAGTCACGATTACCGCGG |
| | | ACGAATCCACGAGCACAGCCTACATGGAGCTGAGC |
| | | AGCCTGAGGAGCGAGGACACGGCCGTGTATTACTG |
| | | TGCGAGAGATCGGGGGAGAAGATATTGTAGTGGTG |
| | | GTAGCTGCCCTAATGCTTTTGATATCTGGGGCCAA |
| | | GGGACAATGGTCACCGTGTCTTCAGGGTCAACCTC |
| | | TGGTAGCGGTAAGCCTGGCTCCGGCGAAGGCTCCA |
| | | CAAAGGGTGAAATTGTGTTGACACAGTCTCCAGCC |
| | | ACCCTGTCTGTGTCTCCAGGGGAAAGAGCCACCCT |
| | | CTCCTGCAGGGCCAGTCAGAGTGTTAGCAGCAACT |
| | | TAGCCTGGTACCAGCAGAAACCTGGCCAGGCTCCC |
| | | AGGCTCCTCATCTATGGTGCATCCACCAGGGCCAC |
| | | TGGTATCCCAGCCAGGTTCAGTGGCAGTGGGTCTG |
| | | GGACAGAGTTCACTCTCACCATCAGCAGCCTGCAG |
| | | TCTGAAGATTTTGCAGTTTATTACTGTCAGCAGTA |
| | | TAATAACTGGCCCCCGGCCCTCACTTTCGGCGGAG |
| | | GGACCAAGGTGGAAATCAAAGAGCAGAAACTGATC |
| | | AGCGAGGAAGATCTGAATCCTGGCGGAGGCGGAGG |
| | | AAGTGGTGGCGGAGGTTCTGGTGGCGGTGGATCAG |
| | | GCGGTGGCGGATCTGGATCTATGGATATCCAGATG |
| | | ACCCAGTCCCCGAGCTCCCTGTCCGCCTCTGTGGG |
| | | CGATAGGGTCACCATCACCTGCCGTGCCAGTCAGG |
| | | ACATCCGTAATTATCTGAACTGGTATCAACAGAAA |
| | | CCAGGAAAAGCTCCGAAACTACTGATTTACTATAC |
| | | CTCCCGCCTGGAGTCTGGAGTCCCTTCTCGCTTCT |
| | | CTGGTTCTGGTTCTGGGACGGATTACACTCTGACC |
| | | ATCAGCAGTCTGCAACCGGAAGACTTCGCAACTTA |
| | | TTACTGTCAGCAAGGTAATACTCTGCCGTGGACGT |
| | | TCGGACAGGGCACCAAGGTGGAGATCAAAGGCGGC |
| | | GGCGGAAGTGGAGGAGGAGGCTCAGGCGGAGGAGG |
| | | GAGCGAGGTTCAGCTGGTGGAGTCTGGCGGTGGCC |
| | | TGGTGCAGCCAGGGGGCTCACTCCGTTTGTCCTGT |
| | | GCAGCTTCTGGCTACTCCTTTACCGGCTACACTAT |
| | | GAACTGGGTGCGTCAGGCCCCAGGTAAGGGCCTGG |
| | | AATGGGTTGCACTGATTAATCCTACCAAAGGTGTT |
| | | AGTACCTACAACCAGAAGTTCAAGGACCGTTTCAC |
| | | TATAAGCGTAGATAAATCCAAAAACACAGCCTACC |
| | | TGCAAATGAACAGCCTGCGTGCTGAGGACACTGCC |
| | | GTCTATTATTGTGCTAGAAGCGGATACTACGGCGA |
| | | TAGTGACTGGTATTTTGACGTGTGGGGTCAAGGAA |
| | | CCCTGGTCACCGTCTCCTCGACATCTGGCGGCGGA |
| | | GGATCTCTGGAATCTGGACAGGTGCTGCTGGAAAG |
| | | CAACATCAAGGTGCTGCCCACCTGGTCTACCCCAG |
| | | TTCAGCCTATGGCTCTGATTGTGCTTGGCGGAGTT |
| | | GCCGGCCTGCTGCTCTTTATCGGCCTGGGCATCTT |
| | | CTTTTGCGTGCGGTGCAGACATCGGCGGAGACAGG |
| | | CTGAGAGAATGAGCCAGATCAAGCGGCTGCTGAGC |
| | | GAGAAGAAAACCTGTCAGTGCCCTCACCGGTTCCA |
| | | GAAAACATGCAGCCCCATC |
| 605 | Nucleotide | ATGGCTCTGCCTGTGACAGCTCTGTTGCTGCCTCT |
| | | GGCTCTGCTGCTGCATGCTGCTAGACCTCAGGTTC |
| | | AGCTGGTGCAGTCTGGGGCTGAGGTGAAGAAGCCT |
| | | GGGTCCTCGGTGAAGGTCTCCTGCAAGGCTTCTGG |
| | | AGGCACCTTCAGCAGCTATGCTATCAGCTGGGTGC |
| | | GACAGGCCCCTGGACAAGGGCTTGAGTGGATGGGA |
| | | GGGATCATCCCTATCTTTGGTACAGCAAACTACGC |
| | | ACAGAAGTTCCAGGGCAGAGTCACGATTACCGCGG |
| | | ACGAATCCACGAGCACAGCCTACATGGAGCTGAGC |
| | | AGCCTGAGGAGCGAGGACACGGCCGTGTATTACTG |
| | | TGCGAGAGGGGGTTACGTTTGGGGGAGTTATCGTC |
| | | AGAACTCCAACTGGTTCGACCCCTGGGGCCAGGGA |
| | | ACCCTGGTCACCGTGTCCTCAGGGTCAACCTCTGG |
| | | TAGCGGTAAGCCTGGCTCCGGCGAAGGCTCCACAA |
| | | AGGGTTCCTATGTGCTGACTCAGCCACCCTCAGCG |
| | | TCTGGGACCCCCGGGCAGAGGGTCACCATCTCTTG |
| | | TTCTGGAAGCAGCTCCAACATCGGAAGTAATTATG |
| | | TATACTGGTACCAGCAGCTCCCAGGAACGGCCCCC |
| | | AAACTCCTCATCTATAGGAATAATCAGCGGCCCTC |
| | | AGGGGTCCCTGACCGATTCTCTGGCTCCAAGTCTG |
| | | GCACCTCAGCCTCCCTGGCCATCAGTGGGCTCCGG |
| | | TCCGAGGATGAGGCTGATTATTACTGTGCAGCATG |
| | | GGATGACAGCCTGAGTGGTTGGGTGTTCGGCGGAG |
| | | GGACCAAGCTGACCGTCCTAGAGCAGAAACTGATC |
| | | AGCGAGGAAGATCTGAATCCTGGCGGAGGCGGAGG |
| | | AAGTGGTGGCGGAGGTTCTGGTGGCGGTGGATCAG |
| | | GCGGTGGCGGATCTGGATCTATGGATATCCAGATG |
| | | ACCCAGTCCCCGAGCTCCCTGTCCGCCTCTGTGGG |
| | | CGATAGGGTCACCATCACCTGCCGTGCCAGTCAGG |
| | | ACATCCGTAATTATCTGAACTGGTATCAACAGAAA |
| | | CCAGGAAAAGCTCCGAAACTACTGATTTACTATAC |
| | | CTCCCGCCTGGAGTCTGGAGTCCCTTCTCGCTTCT |
| | | CTGGTTCTGGTTCTGGGACGGATTACACTCTGACC |
| | | ATCAGCAGTCTGCAACCGGAAGACTTCGCAACTTA |
| | | TTACTGTCAGCAAGGTAATACTCTGCCGTGGACGT |
| | | TCGGACAGGGCACCAAGGTGGAGATCAAAGGCGGC |
| | | GGCGGAAGTGGAGGAGGAGGCTCAGGCGGAGGAGG |
| | | GAGCGAGGTTCAGCTGGTGGAGTCTGGCGGTGGCC |
| | | TGGTGCAGCCAGGGGGCTCACTCCGTTTGTCCTGT |
| | | GCAGCTTCTGGCTACTCCTTTACCGGCTACACTAT |
| | | GAACTGGGTGCGTCAGGCCCCAGGTAAGGGCCTGG |
| | | AATGGGTTGCACTGATTAATCCTACCAAAGGTGTT |
| | | AGTACCTACAACCAGAAGTTCAAGGACCGTTTCAC |
| | | TATAAGCGTAGATAAATCCAAAAACACAGCCTACC |
| | | TGCAAATGAACAGCCTGCGTGCTGAGGACACTGCC |
| | | GTCTATTATTGTGCTAGAAGCGGATACTACGGCGA |
| | | TAGTGACTGGTATTTTGACGTGTGGGGTCAAGGAA |
| | | CCCTGGTCACCGTCTCCTCGACATCTGGCGGCGGA |
| | | GGATCTCTGGAATCTGGACAGGTGCTGCTGGAAAG |
| | | CAACATCAAGGTGCTGCCCACCTGGTCTACCCCAG |
| | | TTCAGCCTATGGCTCTGATTGTGCTTGGCGGAGTT |
| | | GCCGGCCTGCTGCTCTTTATCGGCCTGGGCATCTT |
| | | CTTTTGCGTGCGGTGCAGACATCGGCGGAGACAGG |
| | | CTGAGAGAATGAGCCAGATCAAGCGGCTGCTGAGC |
| | | GAGAAGAAAACCTGTCAGTGCCCTCACCGGTTCCA |
| | | GAAAACATGCAGCCCCATC |
| 606 | Nucleotide | ATGGCTCTGCCTGTGACAGCTCTGTTGCTGCCTCT |
| | | GGCTCTGCTGCTGCATGCTGCTAGACCTCAGGTGC |
| | | AGCTGGTGGAGTCTGGGGCTGAGGTGAAGAAGCCT |
| | | GGGTCCTCGGTGAAGGTCTCCTGCAAGGCTTCGGG |
| | | AGGCACCTTCAGCAGCTATGCTATCAGCTGGGTGC |
| | | GACAGGCCCCTGGACAAGGGCTTGAGTGGATGGGA |
| | | GGGATCATCCCTATCTTTGGTACAGCAAACTACGC |
| | | ACAGAAGTTCCAGGGCAGAGTCACGATTACCGCGG |
| | | ACGAATCCACGAGCACAGCCTACATGGAGCTGAGC |
| | | AGCCTGAGGAGCGAGGACACGGCCGTGTATTACTG |
| | | TGCGAGAGACATATTACGATTGAGCGTGTCCTCGG |
| | | GTATGGACGTCTGGGGCCAAGGGACCCTGGTCACC |
| | | GTGTCCTCAGGGTCAACCTCTGGTAGCGGTAAGCC |
| | | TGGCTCCGGCGAAGGCTCCACAAAGGGTCAGTCTG |
| | | TGCTGACTCAGCCACCCTCAGCGTCTGGGACCCCC |
| | | GGGCGGAGGGTCACCATCTCTTGTTCTGGAAGCAG |
| | | CTCCAACATCGGAAGTAATTATGTATACTGGTACC |
| | | AGCAGCTCCCAGGAACGGCCCCCAAACTCCTCATC |
| | | TATAGGAATAATCAGCGGCCCTCAGGGGTCCCTGA |
| | | CCGATTCTCTGGCTCCAAGTCTGGCACCTCAGCCT |
| | | CCCTGGCCATCAGTGGGCTCCGGTCCGAGGATGAG |
| | | GCTGATTATTACTGTGCAGCATGGGATGACAGCCT |
| | | GAGTGGTGTGGTATTCGGCGGAGGGACCAAGCTGA |
| | | CCGTCCTAGAGCAGAAACTGATCAGCGAGGAAGAT |
| | | CTGAATCCTGGCGGAGGCGGAGGAAGTGGTGGCGG |
| | | AGGTTCTGGTGGCGGTGGATCAGGCGGTGGCGGAT |
| | | CTGGATCTATGGATATCCAGATGACCCAGTCCCCG |
| | | AGCTCCCTGTCCGCCTCTGTGGGCGATAGGGTCAC |
| | | CATCACCTGCCGTGCCAGTCAGGACATCCGTAATT |
| | | ATCTGAACTGGTATCAACAGAAACCAGGAAAAGCT |
| | | CCGAAACTACTGATTTACTATACCTCCCGCCTGGA |
| | | GTCTGGAGTCCCTTCTCGCTTCTCTGGTTCTGGTT |
| | | CTGGGACGGATTACACTCTGACCATCAGCAGTCTG |
| | | CAACCGGAAGACTTCGCAACTTATTACTGTCAGCA |
| | | AGGTAATACTCTGCCGTGGACGTTCGGACAGGGCA |
| | | CCAAGGTGGAGATCAAAGGCGGCGGCGGAAGTGGA |
| | | GGAGGAGGCTCAGGCGGAGGAGGGAGCGAGGTTCA |
| | | GCTGGTGGAGTCTGGCGGTGGCCTGGTGCAGCCAG |
| | | GGGGCTCACTCCGTTTGTCCTGTGCAGCTTCTGGC |
| | | TACTCCTTTACCGGCTACACTATGAACTGGGTGCG |
| | | TCAGGCCCCAGGTAAGGGCCTGGAATGGGTTGCAC |
| | | TGATTAATCCTACCAAAGGTGTTAGTACCTACAAC |
| | | CAGAAGTTCAAGGACCGTTTCACTATAAGCGTAGA |
| | | TAAATCCAAAAACACAGCCTACCTGCAAATGAACA |
| | | GCCTGCGTGCTGAGGACACTGCCGTCTATTATTGT |
| | | GCTAGAAGCGGATACTACGGCGATAGTGACTGGTA |
| | | TTTTGACGTGTGGGGTCAAGGAACCCTGGTCACCG |
| | | TCTCCTCGACATCTGGCGGCGGAGGATCTCTGGAA |
| | | TCTGGACAGGTGCTGCTGGAAAGCAACATCAAGGT |
| | | GCTGCCCACCTGGTCTACCCCAGTTCAGCCTATGG |
| | | CTCTGATTGTGCTTGGCGGAGTTGCCGGCCTGCTG |
| | | CTCTTTATCGGCCTGGGCATCTTCTTTTGCGTGCG |
| | | GTGCAGACATCGGCGGAGACAGGCTGAGAGAATGA |
| | | GCCAGATCAAGCGGCTGCTGAGCGAGAAGAAAACC |
| | | TGTCAGTGCCCTCACCGGTTCCAGAAAACATGCAG |
| | | CCCCATC |
| 607 | Nucleotide | ATGGCTCTGCCTGTGACAGCTCTGTTGCTGCCTCT |
| | | GGCTCTGCTGCTGCATGCTGCTAGACCTCAGGTGC |
| | | AGCTGGTGGAGTCTGGGGGAGGCTTGGTCCAGCCT |
| | | GGGGGGTCCCTGAGACTCTCCTGTGCAGCCTCTGG |
| | | ATTCACCTTTAGTAGCTATTGGATGAGCTGGGTCC |
| | | GCCAGGCTCCAGGGAAGGGGCTGGAGTGGGTGGCC |
| | | AACATAAAGCAAGATGGAAGTGAGAAATACTATGT |
| | | GGACTCTGTGAAGGGCCGATTCACCATCTCCAGAG |
| | | ACAACGCCAAGAACTCACTGTATCTGCAAATGAAC |
| | | AGCCTGAGAGCCGAGGACACGGCTGTGTATTACTG |
| | | TGCGAGATGGAGTCATTACTATGATAGTAGTGGTC |
| | | TTGACTACTGGGGCCAGGGAACCCTGGTCACCGTG |
| | | TCCTCAGGGTCAACCTCTGGTAGCGGTAAGCCTGG |
| | | CTCCGGCGAAGGCTCCACAAAGGGTTCCTATGTGC |
| | | TGACTCAGCCACCCTCGGTGTCAGTGTCCCCAGGA |
| | | CAGACGGCCAGGATCACCTGCTCTGGAGATGCATT |
| | | GCCAAAGCAATATGCTTATTGGTACCAGCAGAAGC |
| | | CAGGCCAGGCCCCTGTGCTGGTGATATATAAAGAC |
| | | AGTGAGAGGCCCTCAGGGATCCCTGAGCGATTCTC |
| | | TGGCTCCAGCTCAGGGACAACAGTCACGTTGACCA |
| | | TCAGTGGAGTCCAGGCAGAAGACGAGGCTGACTAT |
| | | TACTGTCAATCAGCAGACAGCAGTGGTACTTGGGT |
| | | GTTCGGCGGAGGGACCAAGCTGACCGTCCTAGAGC |
| | | AGAAACTGATCAGCGAGGAAGATCTGAATCCTGGC |
| | | GGAGGCGGAGGAAGTGGTGGCGGAGGTTCTGGTGG |
| | | CGGTGGATCAGGCGGTGGCGGATCTGGATCTATGG |
| | | ATATCCAGATGACCCAGTCCCCGAGCTCCCTGTCC |
| | | GCCTCTGTGGGCGATAGGGTCACCATCACCTGCCG |
| | | TGCCAGTCAGGACATCCGTAATTATCTGAACTGGT |
| | | ATCAACAGAAACCAGGAAAAGCTCCGAAACTACTG |
| | | ATTTACTATACCTCCCGCCTGGAGTCTGGAGTCCC |
| | | TTCTCGCTTCTCTGGTTCTGGTTCTGGGACGGATT |
| | | ACACTCTGACCATCAGCAGTCTGCAACCGGAAGAC |
| | | TTCGCAACTTATTACTGTCAGCAAGGTAATACTCT |
| | | GCCGTGGACGTTCGGACAGGGCACCAAGGTGGAGA |
| | | TCAAAGGCGGCGGCGGAAGTGGAGGAGGAGGCTCA |
| | | GGCGGAGGAGGGAGCGAGGTTCAGCTGGTGGAGTC |
| | | TGGCGGTGGCCTGGTGCAGCCAGGGGGCTCACTCC |
| | | GTTTGTCCTGTGCAGCTTCTGGCTACTCCTTTACC |
| | | GGCTACACTATGAACTGGGTGCGTCAGGCCCCAGG |
| | | TAAGGGCCTGGAATGGGTTGCACTGATTAATCCTA |
| | | CCAAAGGTGTTAGTACCTACAACCAGAAGTTCAAG |
| | | GACCGTTTCACTATAAGCGTAGATAAATCCAAAAA |
| | | CACAGCCTACCTGCAAATGAACAGCCTGCGTGCTG |
| | | AGGACACTGCCGTCTATTATTGTGCTAGAAGCGGA |
| | | TACTACGGCGATAGTGACTGGTATTTTGACGTGTG |
| | | GGGTCAAGGAACCCTGGTCACCGTCTCCTCGACAT |
| | | CTGGCGGCGGAGGATCTCTGGAATCTGGACAGGTG |
| | | CTGCTGGAAAGCAACATCAAGGTGCTGCCCACCTG |
| | | GTCTACCCCAGTTCAGCCTATGGCTCTGATTGTGC |
| | | TTGGCGGAGTTGCCGGCCTGCTGCTCTTTATCGGC |
| | | CTGGGCATCTTCTTTTGCGTGCGGTGCAGACATCG |
| | | GCGGAGACAGGCTGAGAGAATGAGCCAGATCAAGC |
| | | GGCTGCTGAGCGAGAAGAAAACCTGTCAGTGCCCT |
| | | CACCGGTTCCAGAAAACATGCAGCCCCATC |
| 608 | Nucleotide | ATGGCTCTGCCTGTGACAGCTCTGTTGCTGCCTCT |
| | | GGCTCTGCTGCTGCATGCTGCTAGACCTCAGGTGC |
| | | AGCTGGTGGAGTCTGGGGCTGAGGTGAAGAAGCCT |
| | | GGGTCCTCGGTGAAGGTCTCCTGCAAGGCTTCTGG |
| | | AGGCACCTTCAGCAGCTATGCTATCAGCTGGGTGC |
| | | GACAGGCCCCTGGACAAGGGCTTGAGTGGATGGGA |
| | | GGGATCATCCCTATCTTTGGTACAGCAAACTACGC |
| | | ACAGAAGTTCCAGGGCAGAGTCACGATTACCGCGG |
| | | ACAAATCCACGAGCACAGCCTACATGGAGCTGAGC |
| | | AGCCTGAGGAGCGAGGACACGGCCGTGTATTACTG |
| | | TGCGAGGACCCATCTACCATACAGCTATGGTTTAG |
| | | GCGGGTTTGACTACTGGGGCCAGGGAACCCTGGTC |
| | | ACCGTGTCCTCAGGGTCAACCTCTGGTAGCGGTAA |
| | | GCCTGGCTCCGGCGAAGGCTCCACAAAGGGTCAGT |
| | | CTGTGCTGACGCAGCCGCCCTCAGTGTCTGGGGCC |
| | | CCAGGGCAGAGGGTCACCATCTCCTGCACTGGGAG |
| | | CAGCTCCAACATCGGGGCAGGTTATGATGTACACT |
| | | GGTACCAGCAGCTTCCAGGAACAGCCCCCAAACTC |
| | | CTCATCTATGGTAACAGCAATCGGCCCTCAGGGGT |
| | | CCCTGACCGATTCTCTGGCTCCAAGTCTGGCACCT |
| | | CAGCCTCCCTGGCCATCACTGGGCTCCAGGCTGAG |
| | | GATGAGGCTGATTATTACTGCCAGTCCTATGACAG |
| | | CAGCCTGAGTGGCCCGGTGGTATTCGGCGGAGGGA |
| | | CCAAGGTCACCGTCCTAGAGCAGAAACTGATCAGC |
| | | GAGGAAGATCTGAATCCTGGCGGAGGCGGAGGAAG |
| | | TGGTGGCGGAGGTTCTGGTGGCGGTGGATCAGGCG |
| | | GTGGCGGATCTGGATCTATGGATATCCAGATGACC |
| | | CAGTCCCCGAGCTCCCTGTCCGCCTCTGTGGGCGA |
| | | TAGGGTCACCATCACCTGCCGTGCCAGTCAGGACA |
| | | TCCGTAATTATCTGAACTGGTATCAACAGAAACCA |
| | | GGAAAAGCTCCGAAACTACTGATTTACTATACCTC |
| | | CCGCCTGGAGTCTGGAGTCCCTTCTCGCTTCTCTG |
| | | GTTCTGGTTCTGGGACGGATTACACTCTGACCATC |
| | | AGCAGTCTGCAACCGGAAGACTTCGCAACTTATTA |
| | | CTGTCAGCAAGGTAATACTCTGCCGTGGACGTTCG |
| | | GACAGGGCACCAAGGTGGAGATCAAAGGCGGCGGC |
| | | GGAAGTGGAGGAGGAGGCTCAGGCGGAGGAGGGAG |
| | | CGAGGTTCAGCTGGTGGAGTCTGGCGGTGGCCTGG |
| | | TGCAGCCAGGGGGCTCACTCCGTTTGTCCTGTGCA |
| | | GCTTCTGGCTACTCCTTTACCGGCTACACTATGAA |
| | | CTGGGTGCGTCAGGCCCCAGGTAAGGGCCTGGAAT |
| | | GGGTTGCACTGATTAATCCTACCAAAGGTGTTAGT |
| | | ACCTACAACCAGAAGTTCAAGGACCGTTTCACTAT |
| | | AAGCGTAGATAAATCCAAAAACACAGCCTACCTGC |
| | | AAATGAACAGCCTGCGTGCTGAGGACACTGCCGTC |
| | | TATTATTGTGCTAGAAGCGGATACTACGGCGATAG |
| | | TGACTGGTATTTTGACGTGTGGGGTCAAGGAACCC |
| | | TGGTCACCGTCTCCTCGACATCTGGCGGCGGAGGA |
| | | TCTCTGGAATCTGGACAGGTGCTGCTGGAAAGCAA |
| | | CATCAAGGTGCTGCCCACCTGGTCTACCCCAGTTC |
| | | AGCCTATGGCTCTGATTGTGCTTGGCGGAGTTGCC |
| | | GGCCTGCTGCTCTTTATCGGCCTGGGCATCTTCTT |
| | | TTGCGTGCGGTGCAGACATCGGCGGAGACAGGCTG |
| | | AGAGAATGAGCCAGATCAAGCGGCTGCTGAGCGAG |
| | | AAGAAAACCTGTCAGTGCCCTCACCGGTTCCAGAA |
| | | AACATGCAGCCCCATC |
| 609 | Nucleotide | ATGGCTCTGCCTGTGACAGCTCTGTTGCTGCCTCT |
| | | GGCTCTGCTGCTGCATGCTGCTAGACCTGAGGTGC |
| | | AGCTGGTGCAGTCTGGGGCTGAGGTGAAGAAGCCT |
| | | GGGTCCTCGGTGAAGGTCTCCTGCAAGGCTTCTGG |
| | | AGGCACCTTCAGCAGCTATGCTATCAGCTGGGTGC |
| | | GACAGGCCCCTGGACAAGGGCTTGAGTGGATGGGA |
| | | GGGATCATCCCTATCTTTGGTACAGCAAACTACGC |
| | | ACAGAAGTTCCAGGGCAGAGTCACGATTACCGCGG |
| | | ACGAATCCACGAGCACAGCCTACATGGAGCTGAGC |
| | | AGCCTGAGGAGCGAGGACACGGCCGTGTATTACTG |
| | | TGCGAGAGATCCAAGTCGGGATTACTATGGTTCGG |
| | | GGAGATTCTCATGGTTCGACCCCTGGGGCCAGGGA |
| | | ACCCTGGTCACCGTGTCCTCAGGGTCAACCTCTGG |
| | | TAGCGGTAAGCCTGGCTCCGGCGAAGGCTCCACAA |
| | | AGGGTCAGTCTGTGCTGACTCAGCCACCCTCAGCG |
| | | TCTGGGACCCCCGGGCAGAGGGTCACCATCTCTTG |
| | | TTCTGGAAGCAGCTCCAACATCGGAAGTAATTATG |
| | | TATACTGGTACCAGCAGCTCCCAGGAACGGCCCCC |
| | | AAACTCCTCATCTATAGGAATAATCAGCGGCCCTC |
| | | AGGGGTCCCTGACCGATTCTCTGGCTCCAAGTCTG |
| | | GCACCTCAGCCTCCCTGGCCATCAGTGGGCTCCGG |
| | | TCCGAGGATGAGGCTGATTATTACTGTGCAGCATG |
| | | GGATGACAGCCTGAGTGGTCGGGGGGTATTCGGCG |
| | | GAGGGACCAAGCTGACCGTCCTAGAGCAGAAACTG |
| | | ATCAGCGAGGAAGATCTGAATCCTGGCGGAGGCGG |
| | | AGGAAGTGGTGGCGGAGGTTCTGGTGGCGGTGGAT |
| | | CAGGCGGTGGCGGATCTGGATCTATGGATATCCAG |
| | | ATGACCCAGTCCCCGAGCTCCCTGTCCGCCTCTGT |
| | | GGGCGATAGGGTCACCATCACCTGCCGTGCCAGTC |
| | | AGGACATCCGTAATTATCTGAACTGGTATCAACAG |
| | | AAACCAGGAAAAGCTCCGAAACTACTGATTTACTA |
| | | TACCTCCCGCCTGGAGTCTGGAGTCCCTTCTCGCT |
| | | TCTCTGGTTCTGGTTCTGGGACGGATTACACTCTG |
| | | ACCATCAGCAGTCTGCAACCGGAAGACTTCGCAAC |
| | | TTATTACTGTCAGCAAGGTAATACTCTGCCGTGGA |
| | | CGTTCGGACAGGGCACCAAGGTGGAGATCAAAGGC |
| | | GGCGGCGGAAGTGGAGGAGGAGGCTCAGGCGGAGG |
| | | AGGGAGCGAGGTTCAGCTGGTGGAGTCTGGCGGTG |
| | | GCCTGGTGCAGCCAGGGGGCTCACTCCGTTTGTCC |
| | | TGTGCAGCTTCTGGCTACTCCTTTACCGGCTACAC |
| | | TATGAACTGGGTGCGTCAGGCCCCAGGTAAGGGCC |
| | | TGGAATGGGTTGCACTGATTAATCCTACCAAAGGT |
| | | GTTAGTACCTACAACCAGAAGTTCAAGGACCGTTT |
| | | CACTATAAGCGTAGATAAATCCAAAAACACAGCCT |
| | | ACCTGCAAATGAACAGCCTGCGTGCTGAGGACACT |
| | | GCCGTCTATTATTGTGCTAGAAGCGGATACTACGG |
| | | CGATAGTGACTGGTATTTTGACGTGTGGGGTCAAG |
| | | GAACCCTGGTCACCGTCTCCTCGACATCTGGCGGC |
| | | GGAGGATCTCTGGAATCTGGACAGGTGCTGCTGGA |
| | | AAGCAACATCAAGGTGCTGCCCACCTGGTCTACCC |
| | | CAGTTCAGCCTATGGCTCTGATTGTGCTTGGCGGA |
| | | GTTGCCGGCCTGCTGCTCTTTATCGGCCTGGGCAT |
| | | CTTCTTTTGCGTGCGGTGCAGACATCGGCGGAGAC |
| | | AGGCTGAGAGAATGAGCCAGATCAAGCGGCTGCTG |
| | | AGCGAGAAGAAAACCTGTCAGTGCCCTCACCGGTT |
| | | CCAGAAAACATGCAGCCCCATC |
| 610 | Nucleotide | ATGGCTCTGCCTGTGACAGCTCTGTTGCTGCCTCT |
| | | GGCTCTGCTGCTGCATGCTGCTAGACCTCAGGTGC |
| | | AGCTGGTGCAGTCTGGGGCTGAGGTGAAGAAGCCT |
| | | GGGGCCTCAGTGAAGGTCTCCTGCAAGGCTTCTGG |
| | | TTACACCTTTACCAGCTATGGTATCAGCTGGGTGC |
| | | GACAGGCCCCTGGACAAGGGCTTGAGTGGATGGGA |
| | | TGGATCAGCGCTTACAATGGTAACACAAACTATGC |
| | | ACAGAAGCTCCAGGGCAGAGTCACCATGACCACAG |
| | | ACACATCCACGAGCACAGCCTACATGGAGCTGAGG |
| | | AGCCTGAGGAGCGACGACACGGCCGTGTATTACTG |
| | | TGCGAGAGATATAATACGATATTGTAGTAGTACCA |
| | | GCTGCTATAGAGGGATTGACTACTGGGGCCAGGGA |
| | | ACCCTGGTCACCGTGTCCTCAGGGTCAACCTCTGG |
| | | TAGCGGTAAGCCTGGCTCCGGCGAAGGCTCCACAA |
| | | AGGGTCAGTCTGCCCTGACTCAGCCTGCCTCCGTG |
| | | TCTGGGTCTCCTGGACAGTCGATCACCATCTCCTG |
| | | CACTGGAACCAGCAGTGACGTTGGTGGTTATAACT |
| | | ATGTCTCCTGGTACCAACAGCACCCAGGCAAAGCC |
| | | CCCAAACTCATGATTTATGATGTCAGTAATCGGCC |
| | | CTCAGGGGTTTCTAATCGCTTCTCTGGCTCCAAGT |
| | | CTGGCAACACGGCCTCCCTGACCATCTCTGGGCTC |
| | | CAGGCTGAGGACGAGGCTGATTATTACTGCAGCTC |
| | | ATATACAAGCAGCAGCCCCCATGTGGTATCCGGCG |
| | | GAGGGACCAAGCTGACGGTCCTAGAGCAGAAACTG |
| | | ATCAGCGAGGAAGATCTGAATCCTGGCGGAGGCGG |
| | | AGGAAGTGGTGGCGGAGGTTCTGGTGGCGGTGGAT |
| | | CAGGCGGTGGCGGATCTGGATCTATGGATATCCAG |
| | | ATGACCCAGTCCCCGAGCTCCCTGTCCGCCTCTGT |
| | | GGGCGATAGGGTCACCATCACCTGCCGTGCCAGTC |
| | | AGGACATCCGTAATTATCTGAACTGGTATCAACAG |
| | | AAACCAGGAAAAGCTCCGAAACTACTGATTTACTA |
| | | TACCTCCCGCCTGGAGTCTGGAGTCCCTTCTCGCT |
| | | TCTCTGGTTCTGGTTCTGGGACGGATTACACTCTG |
| | | ACCATCAGCAGTCTGCAACCGGAAGACTTCGCAAC |
| | | TTATTACTGTCAGCAAGGTAATACTCTGCCGTGGA |
| | | CGTTCGGACAGGGCACCAAGGTGGAGATCAAAGGC |
| | | GGCGGCGGAAGTGGAGGAGGAGGCTCAGGCGGAGG |
| | | AGGGAGCGAGGTTCAGCTGGTGGAGTCTGGCGGTG |
| | | GCCTGGTGCAGCCAGGGGGCTCACTCCGTTTGTCC |
| | | TGTGCAGCTTCTGGCTACTCCTTTACCGGCTACAC |
| | | TATGAACTGGGTGCGTCAGGCCCCAGGTAAGGGCC |
| | | TGGAATGGGTTGCACTGATTAATCCTACCAAAGGT |
| | | GTTAGTACCTACAACCAGAAGTTCAAGGACCGTTT |
| | | CACTATAAGCGTAGATAAATCCAAAAACACAGCCT |
| | | ACCTGCAAATGAACAGCCTGCGTGCTGAGGACACT |
| | | GCCGTCTATTATTGTGCTAGAAGCGGATACTACGG |
| | | CGATAGTGACTGGTATTTTGACGTGTGGGGTCAAG |
| | | GAACCCTGGTCACCGTCTCCTCGACATCTGGCGGC |
| | | GGAGGATCTCTGGAATCTGGACAGGTGCTGCTGGA |
| | | AAGCAACATCAAGGTGCTGCCCACCTGGTCTACCC |
| | | CAGTTCAGCCTATGGCTCTGATTGTGCTTGGCGGA |
| | | GTTGCCGGCCTGCTGCTCTTTATCGGCCTGGGCAT |
| | | CTTCTTTTGCGTGCGGTGCAGACATCGGCGGAGAC |
| | | AGGCTGAGAGAATGAGCCAGATCAAGCGGCTGCTG |
| | | AGCGAGAAGAAAACCTGTCAGTGCCCTCACCGGTT |
| | | CCAGAAAACATGCAGCCCCATC |
| 611 | Nucleotide | ATGGCTCTGCCTGTGACAGCTCTGTTGCTGCCTCT |
| | | GGCTCTGCTGCTGCATGCTGCTAGACCTCAGGTGC |
| | | AGCTGGTGGAGTCTGGGGGAGGCGTGGTCCAGCCT |
| | | GGGAGGTCCCTGAGACTCTCCTGTGCAGCCTCTGG |
| | | ATTCACCTTCAGTAGCTATGGCATGCACTGGGTCC |
| | | GCCAGGCTCCAGGCAAGGGGCTGGAGTGGGTGGCA |
| | | GTTATATCATATGATGGAAGTAATAAATACTATGC |
| | | AGACTCCGTGAAGGGCCGATTCACCATCTCCAGAG |
| | | ACAATTCCAAGAACACGCTGTATCTGCAAATGAAC |
| | | AGCCTGAGAGCTGAGGACACGGCTGTGTATTACTG |
| | | TGCGAGAGATGGAACGGACTACCGAGGTGCTTTTG |
| | | ATATCTGGGGCCAAGGGACAATGGTCACCGTGTCT |
| | | TCAGGGTCAACCTCTGGTAGCGGTAAGCCTGGCTC |
| | | CGGCGAAGGCTCCACAAAGGGTGACATCCAGTTGA |
| | | CCCAGTCTCCAGACTCCCTGGCTGTGCCTCTGGGC |
| | | GAGAGGGCCACCATCAACTGCAAGTCCAGCCAGAG |
| | | TGTTTTATACAGCTCCAACAATAAGAACTACTTAG |
| | | CTTGGTACCAGCAGAAACCAGGACAGCCTCCTAAG |
| | | CTGCTCATTTACTGGGCATCTACCCGGGAATCCGG |
| | | GGTCCCTGACCGATTCAGTGGCAGCGGGTCTGGGA |
| | | CAGATTTCACTCTCACCATCAGCAGCCTGCAGGCT |
| | | GAAGATGTGGCAGTTTATTACTGTCAGCAATATTA |
| | | TAGTACTCCTCTGACGTTCGGCCAAGGGACCAAGC |
| | | TGGAGATCAAAGAGCAGAAACTGATCAGCGAGGAA |
| | | GATCTGAATCCTGGCGGAGGCGGAGGAAGTGGTGG |
| | | CGGAGGTTCTGGTGGCGGTGGATCAGGCGGTGGCG |
| | | GATCTGGATCTATGGATATCCAGATGACCCAGTCC |
| | | CCGAGCTCCCTGTCCGCCTCTGTGGGCGATAGGGT |
| | | CACCATCACCTGCCGTGCCAGTCAGGACATCCGTA |
| | | ATTATCTGAACTGGTATCAACAGAAACCAGGAAAA |
| | | GCTCCGAAACTACTGATTTACTATACCTCCCGCCT |
| | | GGAGTCTGGAGTCCCTTCTCGCTTCTCTGGTTCTG |
| | | GTTCTGGGACGGATTACACTCTGACCATCAGCAGT |
| | | CTGCAACCGGAAGACTTCGCAACTTATTACTGTCA |
| | | GCAAGGTAATACTCTGCCGTGGACGTTCGGACAGG |
| | | GCACCAAGGTGGAGATCAAAGGCGGCGGCGGAAGT |
| | | GGAGGAGGAGGCTCAGGCGGAGGAGGGAGCGAGGT |
| | | TCAGCTGGTGGAGTCTGGCGGTGGCCTGGTGCAGC |
| | | CAGGGGGCTCACTCCGTTTGTCCTGTGCAGCTTCT |
| | | GGCTACTCCTTTACCGGCTACACTATGAACTGGGT |
| | | GCGTCAGGCCCCAGGTAAGGGCCTGGAATGGGTTG |
| | | CACTGATTAATCCTACCAAAGGTGTTAGTACCTAC |
| | | AACCAGAAGTTCAAGGACCGTTTCACTATAAGCGT |
| | | AGATAAATCCAAAAACACAGCCTACCTGCAAATGA |
| | | ACAGCCTGCGTGCTGAGGACACTGCCGTCTATTAT |
| | | TGTGCTAGAAGCGGATACTACGGCGATAGTGACTG |
| | | GTATTTTGACGTGTGGGGTCAAGGAACCCTGGTCA |
| | | CCGTCTCCTCGACATCTGGCGGCGGAGGATCTCTG |
| | | GAATCTGGACAGGTGCTGCTGGAAAGCAACATCAA |
| | | GGTGCTGCCCACCTGGTCTACCCCAGTTCAGCCTA |
| | | TGGCTCTGATTGTGCTTGGCGGAGTTGCCGGCCTG |
| | | CTGCTCTTTATCGGCCTGGGCATCTTCTTTTGCGT |
| | | GCGGTGCAGACATCGGCGGAGACAGGCTGAGAGAA |
| | | TGAGCCAGATCAAGCGGCTGCTGAGCGAGAAGAAA |
| | | ACCTGTCAGTGCCCTCACCGGTTCCAGAAAACATG |
| | | CAGCCCCATC |
| 612 | Nucleotide | ATGGCTCTGCCTGTGACAGCTCTGTTGCTGCCTCT |
| | | GGCTCTGCTGCTGCATGCTGCTAGACCTGAGGTGC |
| | | AGCTGGTGCAGTCTGGGGCTGAGGTGAAGAAGCCT |
| | | GGGTCCTCGGTGAGGGTCTCCTGCAAGGCTTCTGG |
| | | AGGCACCTTCAGCAGCTATGCTATCAGCTGGGTGC |
| | | GACAGGCCCCTGGACAAGGGCTTGAGTGGATGGGA |
| | | GGGATCATCCCTATCTTTGGTACAGCAAACTACGC |
| | | ACAGAAGTTCCAGGGCAGAGTCACGATTACCGCGG |
| | | ACAAATCCACGAGCACAGCCTACATGGAGCTGAGC |
| | | AGCCTGAGGAGCGAGGACACGGCCGTGTATTACTG |
| | | TGCGAGAGGGGGCGGAAGGTGGCTACACTCCCGTC |
| | | TGGACGTCTGGGGCCAAGGGACCACGGTCACCGTG |
| | | TCCTCAGGGTCAACCTCTGGTAGCGGTAAGCCTGG |
| | | CTCCGGCGAAGGCTCCACAAAGGGTCAGTCTGTGT |
| | | TGACGCAGCCGCCCTCAGTGTCTGGGGCCCCAGGG |
| | | CAGAGGGTCACCATCTCCTGCACTGGGAGCAGCTC |
| | | CAACATCGGGGCAGGTTATGATGTACACTGGTATC |
| | | AGCAGTTTCCAGGAACAGCCCCCAAACTCCTCATC |
| | | TTTGGTAACAACAATCGGCCCTCAGGGGTCCCTGA |
| | | CCGATTCTCTGGCTCCAAGTCTGGCACCTCAGCCT |
| | | CCCTGGCCATCACTGGGCTCCAGGCTGAGGATGAG |
| | | GCTAATTATTACTGCCAGTCCTATGACAGGAGCCT |
| | | GAGTGGTCCCGTGGTCTTCGGCGGAGGGACCAAGC |
| | | TGACCGTCCTAGAGCAGAAACTGATCAGCGAGGAA |
| | | GATCTGAATCCTGGCGGAGGCGGAGGAAGTGGTGG |
| | | CGGAGGTTCTGGTGGCGGTGGATCAGGCGGTGGCG |
| | | GATCTGGATCTATGGATATCCAGATGACCCAGTCC |
| | | CCGAGCTCCCTGTCCGCCTCTGTGGGCGATAGGGT |
| | | CACCATCACCTGCCGTGCCAGTCAGGACATCCGTA |
| | | ATTATCTGAACTGGTATCAACAGAAACCAGGAAAA |
| | | GCTCCGAAACTACTGATTTACTATACCTCCCGCCT |
| | | GGAGTCTGGAGTCCCTTCTCGCTTCTCTGGTTCTG |
| | | GTTCTGGGACGGATTACACTCTGACCATCAGCAGT |
| | | CTGCAACCGGAAGACTTCGCAACTTATTACTGTCA |
| | | GCAAGGTAATACTCTGCCGTGGACGTTCGGACAGG |
| | | GCACCAAGGTGGAGATCAAAGGCGGCGGCGGAAGT |
| | | GGAGGAGGAGGCTCAGGCGGAGGAGGGAGCGAGGT |
| | | TCAGCTGGTGGAGTCTGGCGGTGGCCTGGTGCAGC |
| | | CAGGGGGCTCACTCCGTTTGTCCTGTGCAGCTTCT |
| | | GGCTACTCCTTTACCGGCTACACTATGAACTGGGT |
| | | GCGTCAGGCCCCAGGTAAGGGCCTGGAATGGGTTG |
| | | CACTGATTAATCCTACCAAAGGTGTTAGTACCTAC |
| | | AACCAGAAGTTCAAGGACCGTTTCACTATAAGCGT |
| | | AGATAAATCCAAAAACACAGCCTACCTGCAAATGA |
| | | ACAGCCTGCGTGCTGAGGACACTGCCGTCTATTAT |
| | | TGTGCTAGAAGCGGATACTACGGCGATAGTGACTG |
| | | GTATTTTGACGTGTGGGGTCAAGGAACCCTGGTCA |
| | | CCGTCTCCTCGACATCTGGCGGCGGAGGATCTCTG |
| | | GAATCTGGACAGGTGCTGCTGGAAAGCAACATCAA |
| | | GGTGCTGCCCACCTGGTCTACCCCAGTTCAGCCTA |
| | | TGGCTCTGATTGTGCTTGGCGGAGTTGCCGGCCTG |
| | | CTGCTCTTTATCGGCCTGGGCATCTTCTTTTGCGT |
| | | GCGGTGCAGACATCGGCGGAGACAGGCTGAGAGAA |
| | | TGAGCCAGATCAAGCGGCTGCTGAGCGAGAAGAAA |
| | | ACCTGTCAGTGCCCTCACCGGTTCCAGAAAACATG |
| | | CAGCCCCATC |
| 613 | Nucleotide | ATGGCTCTGCCTGTGACAGCTCTGTTGCTGCCTCT |
| | | GGCTCTGCTGCTGCATGCTGCTAGACCTGAGGTGC |
| | | AGCTGGTGGAGTCTGGGGGAGGCGTGGTCCAGCCT |
| | | GGGAGGTCCCTGAGACTCTCCTGTGCAGCCTCTGG |
| | | ATTCACCTTCAGTAGCTATGGCATGCACTGGGTCC |
| | | GCCAGGCTCCAGGCAAGGGGCTGGAGTGGGTGGCA |
| | | GTTATATCATATGATGGAAGTAATAAATACTATGC |
| | | AGACTCCGTGAAGGGCCGATTCACCATCTCCAGAG |
| | | ACAATTCCAAGAACACGCTGTATCTGCAAATGAAC |
| | | AGCCTGAGAGCTGAGGACACGGCTGTGTATTACTG |
| | | TGCGAAAGATGCTGGGGACCTGGGTGCTTTTGATA |
| | | TCTGGGGCCAAGGGACAATGGTCACCGTGTCTTCA |
| | | GGGTCAACCTCTGGTAGCGGTAAGCCTGGCTCCGG |
| | | CGAAGGCTCCACAAAGGGTGACATCGTGATGACCC |
| | | AGTCTCCAGACTCCCTGGCTGTGTCTCTGGGCGAG |
| | | AGGGCCACCATCAACTGCAAGTCCAGCCAGAGTGT |
| | | TTTATACAGCTCCAACAATAAGAACTACTTAGCTT |
| | | GGTACCAGCAGAAACCAGGACAGCCTCCTAAGCTG |
| | | CTCATTTACTGGGCATCTACCCGGGAATCCGGGGT |
| | | CCCTGACCGATTCAGTGGCAGCGGGTCTGGGACAG |
| | | ATTTCACTCTCACCATCAGCAGCCTGCAGGCTGAA |
| | | GATGTGGCAGTTTATTACTGTCAGCAATATTATAG |
| | | TACTCCTCTCACTTTCGGCCCTGGGACCAAGGTGG |
| | | AAATCAAAGAGCAGAAACTGATCAGCGAGGAAGAT |
| | | CTGAATCCTGGCGGAGGCGGAGGAAGTGGTGGCGG |
| | | AGGTTCTGGTGGCGGTGGATCAGGCGGTGGCGGAT |
| | | CTGGATCTATGGATATCCAGATGACCCAGTCCCCG |
| | | AGCTCCCTGTCCGCCTCTGTGGGCGATAGGGTCAC |
| | | CATCACCTGCCGTGCCAGTCAGGACATCCGTAATT |
| | | ATCTGAACTGGTATCAACAGAAACCAGGAAAAGCT |
| | | CCGAAACTACTGATTTACTATACCTCCCGCCTGGA |
| | | GTCTGGAGTCCCTTCTCGCTTCTCTGGTTCTGGTT |
| | | CTGGGACGGATTACACTCTGACCATCAGCAGTCTG |
| | | CAACCGGAAGACTTCGCAACTTATTACTGTCAGCA |
| | | AGGTAATACTCTGCCGTGGACGTTCGGACAGGGCA |
| | | CCAAGGTGGAGATCAAAGGCGGCGGCGGAAGTGGA |
| | | GGAGGAGGCTCAGGCGGAGGAGGGAGCGAGGTTCA |
| | | GCTGGTGGAGTCTGGCGGTGGCCTGGTGCAGCCAG |
| | | GGGGCTCACTCCGTTTGTCCTGTGCAGCTTCTGGC |
| | | TACTCCTTTACCGGCTACACTATGAACTGGGTGCG |
| | | TCAGGCCCCAGGTAAGGGCCTGGAATGGGTTGCAC |
| | | TGATTAATCCTACCAAAGGTGTTAGTACCTACAAC |
| | | CAGAAGTTCAAGGACCGTTTCACTATAAGCGTAGA |
| | | TAAATCCAAAAACACAGCCTACCTGCAAATGAACA |
| | | GCCTGCGTGCTGAGGACACTGCCGTCTATTATTGT |
| | | GCTAGAAGCGGATACTACGGCGATAGTGACTGGTA |
| | | TTTTGACGTGTGGGGTCAAGGAACCCTGGTCACCG |
| | | TCTCCTCGACATCTGGCGGCGGAGGATCTCTGGAA |
| | | TCTGGACAGGTGCTGCTGGAAAGCAACATCAAGGT |
| | | GCTGCCCACCTGGTCTACCCCAGTTCAGCCTATGG |
| | | CTCTGATTGTGCTTGGCGGAGTTGCCGGCCTGCTG |
| | | CTCTTTATCGGCCTGGGCATCTTCTTTTGCGTGCG |
| | | GTGCAGACATCGGCGGAGACAGGCTGAGAGAATGA |
| | | GCCAGATCAAGCGGCTGCTGAGCGAGAAGAAAACC |
| | | TGTCAGTGCCCTCACCGGTTCCAGAAAACATGCAG |
| | | CCCCATC |
| 614 | Nucleotide | ATGGCTCTGCCTGTGACAGCTCTGTTGCTGCCTCT |
| | | GGCTCTGCTGCTGCATGCTGCTAGACCTCAGGTGC |
| | | AGCTGGTGCAGTCTGGGGGAGGCGTGGTCCAGCCT |
| | | GGGAGGTCCCTGAGACTCTCCTGTGCAGCCTCTGG |
| | | ATTCACCTTCAGTAGCTATGCTATGCACTGGGTCC |
| | | GCCAGGCTCCAGGCAAGGGGCTGGAGTGGGTGGCA |
| | | GTTATATCATATGATGGAAGTAATAAATACTACGC |
| | | AGACTCCGTGAAGGGCCGATTCACCATCTCCAGAG |
| | | ACAATTCCAAGAACACGCTGTATCTGCAAATGAAC |
| | | AGCCTGAGAGCTGAGGACACGGCTGTGTATTACTG |
| | | TGCGAGAGGGCGGGTGTATTACTATGATAGTAGTG |
| | | GTTATAGCTACTGGGGCCAGGGAACCCTGGTCACC |
| | | GTGTCCTCAGGGTCAACCTCTGGTAGCGGTAAGCC |
| | | TGGCTCCGGCGAAGGCTCCACAAAGGGTCAGTCTG |
| | | TGTTGACGCAGCCGCCCTCAGTGTCTGGGGCCCCA |
| | | GGGCAGAGGGTCACCATCTCCTGCACTGGGAGCAG |
| | | CTCCAACATCGGGGCAGGTTATGATGTACACTGGT |
| | | ACCAGCAGCTTCCAGGAACAGCCCCCAAACTCCTC |
| | | ATCTATGGTAACAGCAATCGGCCCTCAGGGGTCCC |
| | | TGACCGATTCTCTGGCTCCAAGTCTGGCACCTCAG |
| | | CCTCCCTGGCCATCACTGGGCTCCAGGCTGAGGAT |
| | | GAGGCTGATTATTACTGCCAGTCCTATGACAGCAG |
| | | CCTGAGTGGCCGGGAGGTCTTCGGAACTGGGACCA |
| | | AGCTGACCGTCCTAGAGCAGAAACTGATCAGCGAG |
| | | GAAGATCTGAATCCTGGCGGAGGCGGAGGAAGTGG |
| | | TGGCGGAGGTTCTGGTGGCGGTGGATCAGGCGGTG |
| | | GCGGATCTGGATCTATGGATATCCAGATGACCCAG |
| | | TCCCCGAGCTCCCTGTCCGCCTCTGTGGGCGATAG |
| | | GGTCACCATCACCTGCCGTGCCAGTCAGGACATCC |
| | | GTAATTATCTGAACTGGTATCAACAGAAACCAGGA |
| | | AAAGCTCCGAAACTACTGATTTACTATACCTCCCG |
| | | CCTGGAGTCTGGAGTCCCTTCTCGCTTCTCTGGTT |
| | | CTGGTTCTGGGACGGATTACACTCTGACCATCAGC |
| | | AGTCTGCAACCGGAAGACTTCGCAACTTATTACTG |
| | | TCAGCAAGGTAATACTCTGCCGTGGACGTTCGGAC |
| | | AGGGCACCAAGGTGGAGATCAAAGGCGGCGGCGGA |
| | | AGTGGAGGAGGAGGCTCAGGCGGAGGAGGGAGCGA |
| | | GGTTCAGCTGGTGGAGTCTGGCGGTGGCCTGGTGC |
| | | AGCCAGGGGGCTCACTCCGTTTGTCCTGTGCAGCT |
| | | TCTGGCTACTCCTTTACCGGCTACACTATGAACTG |
| | | GGTGCGTCAGGCCCCAGGTAAGGGCCTGGAATGGG |
| | | TTGCACTGATTAATCCTACCAAAGGTGTTAGTACC |
| | | TACAACCAGAAGTTCAAGGACCGTTTCACTATAAG |
| | | CGTAGATAAATCCAAAAACACAGCCTACCTGCAAA |
| | | TGAACAGCCTGCGTGCTGAGGACACTGCCGTCTAT |
| | | TATTGTGCTAGAAGCGGATACTACGGCGATAGTGA |
| | | CTGGTATTTTGACGTGTGGGGTCAAGGAACCCTGG |
| | | TCACCGTCTCCTCGACATCTGGCGGCGGAGGATCT |
| | | CTGGAATCTGGACAGGTGCTGCTGGAAAGCAACAT |
| | | CAAGGTGCTGCCCACCTGGTCTACCCCAGTTCAGC |
| | | CTATGGCTCTGATTGTGCTTGGCGGAGTTGCCGGC |
| | | CTGCTGCTCTTTATCGGCCTGGGCATCTTCTTTTG |
| | | CGTGCGGTGCAGACATCGGCGGAGACAGGCTGAGA |
| | | GAATGAGCCAGATCAAGCGGCTGCTGAGCGAGAAG |
| | | AAAACCTGTCAGTGCCCTCACCGGTTCCAGAAAAC |
| | | ATGCAGCCCCATC |
| 615 | Nucleotide | ATGGCTCTGCCTGTGACAGCTCTGTTGCTGCCTCT |
| | | GGCTCTGCTGCTGCATGCTGCTAGACCTCAGGTGC |
| | | AGCTGGTGGAGTCTGGGGCTGAGGTGAAGAAGCCT |
| | | GGGTCCTCGGTGAAGGTCTCCTGCAAGGCTTCTGG |
| | | AGGCACCTTCAGCAGCTATGCTATCAGCTGGGTGC |
| | | GACAGGCCCCTGGACAAGGGCTTGAGTGGATGGGA |
| | | GGGATCATCCCTATCTTTGGTACAGCAAACTACGC |
| | | ACAGAAGTTCCAGGGCAGAGTCACGATTACCGCGG |
| | | ACGAATCCACGAGCACAGCCTACATGGAGCTGAGC |
| | | AGCCTGAGGAGCGAGGACACGGCCGTGTATTACTG |
| | | TGCGCGCCCCCTGTATGCCCCTCGCTTCGGATACG |
| | | GTATGGACGTCTGGGGCCAAGGGACCCTGGTCACC |
| | | GTGTCCTCAGGGTCAACCTCTGGTAGCGGTAAGCC |
| | | TGGCTCCGGCGAAGGCTCCACAAAGGGTCAGTCTG |
| | | TGTTGACGCAGCCGCCCTCAGCGTCTGGGACCCCC |
| | | GGGCAGAGGGTCACCATCTCTTGTTCTGGAAGCAG |
| | | CTCCAACATCGGAAGTAATTATGTATACTGGTACC |
| | | AGCAGCTCCCAGGAACGGCCCCCAAACTCCTCATC |
| | | TATAGGAATAATCAGCGGCCCTCAGGGGTCCCTGA |
| | | CCGATTCTCTGGCTCCAAGTCTGGCACCTCAGCCT |
| | | CCCTGGCCATCAGTGGGCTCCGGTCCGAGGATGAG |
| | | GCTGATTATTACTGTGCAGCATGGGATGACAGCCT |
| | | GAGTGGTTGGGTGTTCGGCGGAGGCACCCAGCTGA |
| | | CCGTCCTCGAGCAGAAACTGATCAGCGAGGAAGAT |
| | | CTGAATCCTGGCGGAGGCGGAGGAAGTGGTGGCGG |
| | | AGGTTCTGGTGGCGGTGGATCAGGCGGTGGCGGAT |
| | | CTGGATCTATGGATATCCAGATGACCCAGTCCCCG |
| | | AGCTCCCTGTCCGCCTCTGTGGGCGATAGGGTCAC |
| | | CATCACCTGCCGTGCCAGTCAGGACATCCGTAATT |
| | | ATCTGAACTGGTATCAACAGAAACCAGGAAAAGCT |
| | | CCGAAACTACTGATTTACTATACCTCCCGCCTGGA |
| | | GTCTGGAGTCCCTTCTCGCTTCTCTGGTTCTGGTT |
| | | CTGGGACGGATTACACTCTGACCATCAGCAGTCTG |
| | | CAACCGGAAGACTTCGCAACTTATTACTGTCAGCA |
| | | AGGTAATACTCTGCCGTGGACGTTCGGACAGGGCA |
| | | CCAAGGTGGAGATCAAAGGCGGCGGCGGAAGTGGA |
| | | GGAGGAGGCTCAGGCGGAGGAGGGAGCGAGGTTCA |
| | | GCTGGTGGAGTCTGGCGGTGGCCTGGTGCAGCCAG |
| | | GGGGCTCACTCCGTTTGTCCTGTGCAGCTTCTGGC |
| | | TACTCCTTTACCGGCTACACTATGAACTGGGTGCG |
| | | TCAGGCCCCAGGTAAGGGCCTGGAATGGGTTGCAC |
| | | TGATTAATCCTACCAAAGGTGTTAGTACCTACAAC |
| | | CAGAAGTTCAAGGACCGTTTCACTATAAGCGTAGA |
| | | TAAATCCAAAAACACAGCCTACCTGCAAATGAACA |
| | | GCCTGCGTGCTGAGGACACTGCCGTCTATTATTGT |
| | | GCTAGAAGCGGATACTACGGCGATAGTGACTGGTA |
| | | TTTTGACGTGTGGGGTCAAGGAACCCTGGTCACCG |
| | | TCTCCTCGACATCTGGCGGCGGAGGATCTCTGGAA |
| | | TCTGGACAGGTGCTGCTGGAAAGCAACATCAAGGT |
| | | GCTGCCCACCTGGTCTACCCCAGTTCAGCCTATGG |
| | | CTCTGATTGTGCTTGGCGGAGTTGCCGGCCTGCTG |
| | | CTCTTTATCGGCCTGGGCATCTTCTTTTGCGTGCG |
| | | GTGCAGACATCGGCGGAGACAGGCTGAGAGAATGA |
| | | GCCAGATCAAGCGGCTGCTGAGCGAGAAGAAAACC |
| | | TGTCAGTGCCCTCACCGGTTCCAGAAAACATGCAG |
| | | CCCCATC |
| 616 | Nucleotide | ATGGCTCTGCCTGTGACAGCTCTGTTGCTGCCTCT |
| | | GGCTCTGCTGCTGCATGCTGCTAGACCTGAGGTGC |
| | | AGCTGTTGGAGTCTGGGGGAGGCTTGGTACAGCCT |
| | | GGGGGGTCCCTGAGACTCTCCTGTGCAGCCTCTGG |
| | | ATTCACCTTTAGCAGCTATGCCATGAGCTGGGTCC |
| | | GCCAGGCTCCAGGGAAGGGGCTGGAGTGGGTCTCA |
| | | GCTATTAGTGGTAGTGGTGGTAGCACATACTACGC |
| | | AGACTCCGTGAAGGGCCGGTTCACCATCTCCAGAG |
| | | ACAATTCCAAGAACACGCTGTATCTGCAAATGAAC |
| | | AGCCTGAGAGCCGAGGACACGGCCGTATATTACTG |
| | | TGCGAAAGATCGAGGGGGGCAGCGGGGTTTTGACT |
| | | ACTGGGGCCAGGGAACCCTGGTCACCGTGTCCTCA |
| | | GGGTCAACCTCTGGTAGCGGTAAGCCTGGCTCCGG |
| | | CGAAGGCTCCACAAAGGGTCAGTCTGTGCTGACTC |
| | | AGCCACCCTCAGCGTCTGGGACCCCCGGGCAGAGG |
| | | GTCACCATCTCTTGTTCTGGAAGCAGCTCCAACAT |
| | | CGGAAGTAATTATGTATACTGGTACCAGCAGCTCC |
| | | CAGGAACGGCCCCCAAACTCCTCATCTATAGGAAT |
| | | AATCAGCGGCCCTCAGGGGTCCCTGACCGATTCTC |
| | | TGGCTCCAAGTCTGGCACCTCAGCCTCCCTGGCCA |
| | | TCAGTGGGCTCCGGTCCGAGGATGAGGCTGATTAT |
| | | TACTGTGCAGCATGGGATGACAGCCTGAGTGGTCT |
| | | GGTGTTCGGCGGAGGGACCAAGCTGACCGTCCTAG |
| | | AGCAGAAACTGATCAGCGAGGAAGATCTGAATCCT |
| | | GGCGGAGGCGGAGGAAGTGGTGGCGGAGGTTCTGG |
| | | TGGCGGTGGATCAGGCGGTGGCGGATCTGGATCTA |
| | | TGGATATCCAGATGACCCAGTCCCCGAGCTCCCTG |
| | | TCCGCCTCTGTGGGCGATAGGGTCACCATCACCTG |
| | | CCGTGCCAGTCAGGACATCCGTAATTATCTGAACT |
| | | GGTATCAACAGAAACCAGGAAAAGCTCCGAAACTA |
| | | CTGATTTACTATACCTCCCGCCTGGAGTCTGGAGT |
| | | CCCTTCTCGCTTCTCTGGTTCTGGTTCTGGGACGG |
| | | ATTACACTCTGACCATCAGCAGTCTGCAACCGGAA |
| | | GACTTCGCAACTTATTACTGTCAGCAAGGTAATAC |
| | | TCTGCCGTGGACGTTCGGACAGGGCACCAAGGTGG |
| | | AGATCAAAGGCGGCGGCGGAAGTGGAGGAGGAGGC |
| | | TCAGGCGGAGGAGGGAGCGAGGTTCAGCTGGTGGA |
| | | GTCTGGCGGTGGCCTGGTGCAGCCAGGGGGCTCAC |
| | | TCCGTTTGTCCTGTGCAGCTTCTGGCTACTCCTTT |
| | | ACCGGCTACACTATGAACTGGGTGCGTCAGGCCCC |
| | | AGGTAAGGGCCTGGAATGGGTTGCACTGATTAATC |
| | | CTACCAAAGGTGTTAGTACCTACAACCAGAAGTTC |
| | | AAGGACCGTTTCACTATAAGCGTAGATAAATCCAA |
| | | AAACACAGCCTACCTGCAAATGAACAGCCTGCGTG |
| | | CTGAGGACACTGCCGTCTATTATTGTGCTAGAAGC |
| | | GGATACTACGGCGATAGTGACTGGTATTTTGACGT |
| | | GTGGGGTCAAGGAACCCTGGTCACCGTCTCCTCGA |
| | | CATCTGGCGGCGGAGGATCTCTGGAATCTGGACAG |
| | | GTGCTGCTGGAAAGCAACATCAAGGTGCTGCCCAC |
| | | CTGGTCTACCCCAGTTCAGCCTATGGCTCTGATTG |
| | | TGCTTGGCGGAGTTGCCGGCCTGCTGCTCTTTATC |
| | | GGCCTGGGCATCTTCTTTTGCGTGCGGTGCAGACA |
| | | TCGGCGGAGACAGGCTGAGAGAATGAGCCAGATCA |
| | | AGCGGCTGCTGAGCGAGAAGAAAACCTGTCAGTGC |
| | | CCTCACCGGTTCCAGAAAACATGCAGCCCCATC |
| 617 | Nucleotide | ATGGCTCTGCCTGTGACAGCTCTGTTGCTGCCTCT |
| | | GGCTCTGCTGCTGCATGCTGCTAGACCTGAGGTGA |
| | | AGCTGGTGGAGAGCGGCGGCGGCCTGGTGCAGCCC |
| | | GGCGGCAGCCTGAAGCTGAGCTGCACCACCAGCGG |
| | | CTTCACCTTCAGCAGCTACGGCCTGAGCTGGATCA |
| | | GGCAGACCCCCGACAAGAGGCTGGAGCTGGTGGCC |
| | | AGCATCAACAGGAACGGCGACAACACCTACTACAC |
| | | CGACAGCGTGAAGGGCAGGTTCACCATCAGCAGGC |
| | | ACGACGCCAAGAACACCCTGAACCTGCAGATGAAC |
| | | AGCCTGAAGAGCGAGGACACCGCCATGTACTACTG |
| | | CACCAGGGGCGGCTTCAGCTACTGGGGCCAGGGCA |
| | | CCCTGGTGACCGTGAGCGCCGGCAGCACCAGCGGC |
| | | AGCGGCAAGCCCGGCAGCGGCGAGGGCAGCACCAA |
| | | GGGCGACATCGTGCTGACCCAGAGCCCCGCCATCA |
| | | TGAGCAGCAGCCCCGGCGAGAAGGTGACCATGACC |
| | | TGCAGCGCCAGCAGCAGCGTGAGCTACATGTACTG |
| | | GTACCAGCAGAGGCCCGGCAGCAGCCCCAGGCTGC |
| | | TGATCTACGACACCAGCAAGCTGGCCAGCGGCGTG |
| | | CCCGTGAGGTTCAGCGGCAGCGTGAGCGGCACCAG |
| | | CTACAGCCTGACCATCAGCAGGATGGAGAGCGAGG |
| | | ACGCCGCCACCTACTACTGCCAGCAGTGGAGCGGC |
| | | TTCCCCCCCATCACCTTCGGCGCCGGCACCAAGCT |
| | | GGAGCTGAAGGAGCAGAAACTGATCAGCGAGGAAG |
| | | ATCTGAATCCTGGCGGAGGCGGAGGAAGTGGTGGC |
| | | GGAGGTTCTGGTGGCGGTGGATCAGGCGGTGGCGG |
| | | ATCTGGATCTATGGATATCCAGATGACCCAGTCCC |
| | | CGAGCTCCCTGTCCGCCTCTGTGGGCGATAGGGTC |
| | | ACCATCACCTGCCGTGCCAGTCAGGACATCCGTAA |
| | | TTATCTGAACTGGTATCAACAGAAACCAGGAAAAG |
| | | CTCCGAAACTACTGATTTACTATACCTCCCGCCTG |
| | | GAGTCTGGAGTCCCTTCTCGCTTCTCTGGTTCTGG |
| | | TTCTGGGACGGATTACACTCTGACCATCAGCAGTC |
| | | TGCAACCGGAAGACTTCGCAACTTATTACTGTCAG |
| | | CAAGGTAATACTCTGCCGTGGACGTTCGGACAGGG |
| | | CACCAAGGTGGAGATCAAAGGCGGCGGCGGAAGTG |
| | | GAGGAGGAGGCTCAGGCGGAGGAGGGAGCGAGGTT |
| | | CAGCTGGTGGAGTCTGGCGGTGGCCTGGTGCAGCC |
| | | AGGGGGCTCACTCCGTTTGTCCTGTGCAGCTTCTG |
| | | GCTACTCCTTTACCGGCTACACTATGAACTGGGTG |
| | | CGTCAGGCCCCAGGTAAGGGCCTGGAATGGGTTGC |
| | | ACTGATTAATCCTACCAAAGGTGTTAGTACCTACA |
| | | ACCAGAAGTTCAAGGACCGTTTCACTATAAGCGTA |
| | | GATAAATCCAAAAACACAGCCTACCTGCAAATGAA |
| | | CAGCCTGCGTGCTGAGGACACTGCCGTCTATTATT |
| | | GTGCTAGAAGCGGATACTACGGCGATAGTGACTGG |
| | | TATTTTGACGTGTGGGGTCAAGGAACCCTGGTCAC |
| | | CGTCTCCTCGACATCTGGCGGCGGAGGATCTCTGG |
| | | AATCTGGACAGGTGCTGCTGGAAAGCAACATCAAG |
| | | GTGCTGCCCACCTGGTCTACCCCAGTTCAGCCTAT |
| | | GGCTCTGATTGTGCTTGGCGGAGTTGCCGGCCTGC |
| | | TGCTCTTTATCGGCCTGGGCATCTTCTTTTGCGTG |
| | | CGGTGCAGACATCGGCGGAGACAGGCTGAGAGAAT |
| | | GAGCCAGATCAAGCGGCTGCTGAGCGAGAAGAAAA |
| | | CCTGTCAGTGCCCTCACCGGTTCCAGAAAACATGC |
| | | AGCCCCATC |
| 618 | Nucleotide | ATGGCTCTGCCTGTGACAGCTCTGTTGCTGCCTCT |
| | | GGCTCTGCTGCTGCATGCTGCTAGACCTGAGGTGA |
| | | AGCTGGTGGAGAGCGGCGGCGGCCTGGTGCAGCCC |
| | | GGCGGCAGCCTGAAGCTGAGCTGCACCACCAGCGG |
| | | CTTCACCTTCAGCAGCTACGGCCTGAGCTGGATCA |
| | | GGCAGACCCCCGACAAGAGGCTGGAGCTGGTGGCC |
| | | AGCATCAACAGGAACGGCGACAACACCTACTACAC |
| | | CGACAGCGTGAGGGGCAGGTTCACCATCAGCAGGG |
| | | ACAACGCCAAGAACACCCTGAACCTGCAGATGAGC |
| | | AGCCTGAAGAGCGAGGACACCGCCATGTACTACTG |
| | | CACCAGGGGCGGCTTCAGCTACTGGGGCCAGGGCA |
| | | CCCTGGTGACCGTGAGCGCCGGCAGCACCAGCGGC |
| | | AGCGGCAAGCCCGGCAGCGGCGAGGGCAGCACCAA |
| | | GGGCGACATCGTGCTGACCCAGAGCCCCGCCACCA |
| | | TGAGCGCCAGCCCCGGCGAGAAGGTGACCCTGACC |
| | | TGCAGCGCCAGCCCCGGCGTGACCTACATGTACTG |
| | | GTACCAGCAGAAGCCCGGCAGCAGCCCCAGGCTGC |
| | | TGATCTACGACACCAGCAACCTGGCCAGCGGCGTG |
| | | CCCCTGAGGTTCAGCGGCAGCGGCAGCGGCACCAG |
| | | CTACAGCCTGACCATCAGCAGGACCGAGGCCGAGG |
| | | ACGCCGCCACCTACTACTGCCAGCAGTGGAGCGGC |
| | | TACCCCCCCATCACCTTCGGCGCCGGCACCAAGCT |
| | | GGAGCTGAGGGAGCAGAAACTGATCAGCGAGGAAG |
| | | ATCTGAATCCTGGCGGAGGCGGAGGAAGTGGTGGC |
| | | GGAGGTTCTGGTGGCGGTGGATCAGGCGGTGGCGG |
| | | ATCTGGATCTATGGATATCCAGATGACCCAGTCCC |
| | | CGAGCTCCCTGTCCGCCTCTGTGGGCGATAGGGTC |
| | | ACCATCACCTGCCGTGCCAGTCAGGACATCCGTAA |
| | | TTATCTGAACTGGTATCAACAGAAACCAGGAAAAG |
| | | CTCCGAAACTACTGATTTACTATACCTCCCGCCTG |
| | | GAGTCTGGAGTCCCTTCTCGCTTCTCTGGTTCTGG |
| | | TTCTGGGACGGATTACACTCTGACCATCAGCAGTC |
| | | TGCAACCGGAAGACTTCGCAACTTATTACTGTCAG |
| | | CAAGGTAATACTCTGCCGTGGACGTTCGGACAGGG |
| | | CACCAAGGTGGAGATCAAAGGCGGCGGCGGAAGTG |
| | | GAGGAGGAGGCTCAGGCGGAGGAGGGAGCGAGGTT |
| | | CAGCTGGTGGAGTCTGGCGGTGGCCTGGTGCAGCC |
| | | AGGGGGCTCACTCCGTTTGTCCTGTGCAGCTTCTG |
| | | GCTACTCCTTTACCGGCTACACTATGAACTGGGTG |
| | | CGTCAGGCCCCAGGTAAGGGCCTGGAATGGGTTGC |
| | | ACTGATTAATCCTACCAAAGGTGTTAGTACCTACA |
| | | ACCAGAAGTTCAAGGACCGTTTCACTATAAGCGTA |
| | | GATAAATCCAAAAACACAGCCTACCTGCAAATGAA |
| | | CAGCCTGCGTGCTGAGGACACTGCCGTCTATTATT |
| | | GTGCTAGAAGCGGATACTACGGCGATAGTGACTGG |
| | | TATTTTGACGTGTGGGGTCAAGGAACCCTGGTCAC |
| | | CGTCTCCTCGACATCTGGCGGCGGAGGATCTCTGG |
| | | AATCTGGACAGGTGCTGCTGGAAAGCAACATCAAG |
| | | GTGCTGCCCACCTGGTCTACCCCAGTTCAGCCTAT |
| | | GGCTCTGATTGTGCTTGGCGGAGTTGCCGGCCTGC |
| | | TGCTCTTTATCGGCCTGGGCATCTTCTTTTGCGTG |
| | | CGGTGCAGACATCGGCGGAGACAGGCTGAGAGAAT |
| | | GAGCCAGATCAAGCGGCTGCTGAGCGAGAAGAAAA |
| | | CCTGTCAGTGCCCTCACCGGTTCCAGAAAACATGC |
| | | AGCCCCATC |
| 619 | Nucleotide | ATGGCTCTGCCTGTGACAGCTCTGTTGCTGCCTCT |
| | | GGCTCTGCTGCTGCATGCTGCTAGACCTGAGGTGA |
| | | AGCTGGTGGAGAGCGGCGGCGGCCTGGTGCAGCCC |
| | | GGCGGCAGCCTGAAGCTGAGCTGCACCACCAGCGG |
| | | CTTCACCTTCAGCAGCTACGGCCTGAGCTGGATCA |
| | | GGCAGACCCCCGACAAGAGGCTGGAGCTGGTGGCC |
| | | AGCATCAACAGGAACGGCGACAACGCCTACTACAT |
| | | CGACAGCGTGAAGGGCAGGTTCACCATCAGCAGGG |
| | | ACAACGCCAAGAACGCCCTGAACCTGCAGATGAGC |
| | | AGCCTGAAGAGCGAGGACACCGCCATGTACTACTG |
| | | CACCAGGGGCGGCTTCAGCCACTGGGGCCAGGGCA |
| | | CCCTGGTGACCGTGGCCGCCGGCAGCACCAGCGGC |
| | | AGCGGCAAGCCCGGCAGCGGCGAGGGCAGCACCAA |
| | | GGGCCAGATCGTGCTGACCCAGAGCCCCGCCATCA |
| | | TGAGCGCCAGCCCCGGCGAGAAGGTGACCATGACC |
| | | TGCAGCGCCAGCAGCAGCGTGAGCTACATGTACTG |
| | | GTACCAGCAGAAGCCCGGCAGCAGCCCCAGGCTGC |
| | | TGATCTACGACACCAGCAACCTGGCCAGCGGCGTG |
| | | CCCGTGAGGTTCAGCGGCAGCGGCAGCGGCACCAG |
| | | CTACAGCCTGATCATCAGCAGGATGGAGGCCGAGG |
| | | ACGCCGCCACCTACTACTGCCAGCAGTGGAGCGGC |
| | | TACCCCCCCATCACCTTCGGCGCCGGCACCAAGCT |
| | | GGAGCTGAAGGAGCAGAAACTGATCAGCGAGGAAG |
| | | ATCTGAATCCTGGCGGAGGCGGAGGAAGTGGTGGC |
| | | GGAGGTTCTGGTGGCGGTGGATCAGGCGGTGGCGG |
| | | ATCTGGATCTATGGATATCCAGATGACCCAGTCCC |
| | | CGAGCTCCCTGTCCGCCTCTGTGGGCGATAGGGTC |
| | | ACCATCACCTGCCGTGCCAGTCAGGACATCCGTAA |
| | | TTATCTGAACTGGTATCAACAGAAACCAGGAAAAG |
| | | CTCCGAAACTACTGATTTACTATACCTCCCGCCTG |
| | | GAGTCTGGAGTCCCTTCTCGCTTCTCTGGTTCTGG |
| | | TTCTGGGACGGATTACACTCTGACCATCAGCAGTC |
| | | TGCAACCGGAAGACTTCGCAACTTATTACTGTCAG |
| | | CAAGGTAATACTCTGCCGTGGACGTTCGGACAGGG |
| | | CACCAAGGTGGAGATCAAAGGCGGCGGCGGAAGTG |
| | | GAGGAGGAGGCTCAGGCGGAGGAGGGAGCGAGGTT |
| | | CAGCTGGTGGAGTCTGGCGGTGGCCTGGTGCAGCC |
| | | AGGGGGCTCACTCCGTTTGTCCTGTGCAGCTTCTG |
| | | GCTACTCCTTTACCGGCTACACTATGAACTGGGTG |
| | | CGTCAGGCCCCAGGTAAGGGCCTGGAATGGGTTGC |
| | | ACTGATTAATCCTACCAAAGGTGTTAGTACCTACA |
| | | ACCAGAAGTTCAAGGACCGTTTCACTATAAGCGTA |
| | | GATAAATCCAAAAACACAGCCTACCTGCAAATGAA |
| | | CAGCCTGCGTGCTGAGGACACTGCCGTCTATTATT |
| | | GTGCTAGAAGCGGATACTACGGCGATAGTGACTGG |
| | | TATTTTGACGTGTGGGGTCAAGGAACCCTGGTCAC |
| | | CGTCTCCTCGACATCTGGCGGCGGAGGATCTCTGG |
| | | AATCTGGACAGGTGCTGCTGGAAAGCAACATCAAG |
| | | GTGCTGCCCACCTGGTCTACCCCAGTTCAGCCTAT |
| | | GGCTCTGATTGTGCTTGGCGGAGTTGCCGGCCTGC |
| | | TGCTCTTTATCGGCCTGGGCATCTTCTTTTGCGTG |
| | | CGGTGCAGACATCGGCGGAGACAGGCTGAGAGAAT |
| | | GAGCCAGATCAAGCGGCTGCTGAGCGAGAAGAAAA |
| | | CCTGTCAGTGCCCTCACCGGTTCCAGAAAACATGC |
| | | AGCCCCATC |
| 620 | Nucleotide | ATGGCTCTGCCTGTGACAGCTCTGTTGCTGCCTCT |
| | | GGCTCTGCTGCTGCATGCTGCTAGACCTGAGGTGA |
| | | AGCTGGTGGAGAGCGGCGGCGGCCTGGTGCAGCCC |
| | | GGCGGCAGCCTGAAGCTGAGCTGCGCCGCCAGCGG |
| | | CTTCACCTTCAGCAGCTACGGCCTGAGCTGGGTGA |
| | | GGCAGACCCCCGACAAGGGCCTGGAGCTGGTGGCC |
| | | AGCATCAACAGGAACGGCGGCAACACCTACTACAC |
| | | CGACAGCGTGAAGGGCAGGTTCACCATCAGCAGGG |
| | | ACAACGCCAAGAACACCCTGAACCTGCAGATGAGC |
| | | AGCCTGAAGAGCGAGGACACCGCCATGTACTACTG |
| | | CGCCAGGGGCGGCTTCACCTACTGGGGCCAGGGCA |
| | | CCCTGGTGACCGTGAGCGCCGGCAGCACCAGCGGC |
| | | AGCGGCAAGCCCGGCAGCGGCGAGGGCAGCACCAA |
| | | GGGCCAGATCGTGCTGACCCAGAGCCCCGCCATCA |
| | | TGAGCGCCTTCCCCGGCGAGAAGGTGACCATGACC |
| | | TGCAGCGCCAGCAGCAGCGTGGGCTACATGTACTG |
| | | GTACCAGCAGAAGCCCGGCAGCAGCCCCAGGCTGC |
| | | TGATCTACGACACCAGCAACCTGGCCAGCGGCGTG |
| | | CCCGTGAGGTTCAGCGGCAGCGGCAGCGGCACCGC |
| | | CTACAGCCTGACCATCAGCAGGATGGAGGCCGAGG |
| | | ACGCCGCCACCTACTACTGCCAGCAGTGGAGCGGC |
| | | TACCCCCCCATCACCTTCGGCGCCGGCACCAAGCT |
| | | GGAGCTGAAGGAGCAGAAACTGATCAGCGAGGAAG |
| | | ATCTGAATCCTGGCGGAGGCGGAGGAAGTGGTGGC |
| | | GGAGGTTCTGGTGGCGGTGGATCAGGCGGTGGCGG |
| | | ATCTGGATCTATGGATATCCAGATGACCCAGTCCC |
| | | CGAGCTCCCTGTCCGCCTCTGTGGGCGATAGGGTC |
| | | ACCATCACCTGCCGTGCCAGTCAGGACATCCGTAA |
| | | TTATCTGAACTGGTATCAACAGAAACCAGGAAAAG |
| | | CTCCGAAACTACTGATTTACTATACCTCCCGCCTG |
| | | GAGTCTGGAGTCCCTTCTCGCTTCTCTGGTTCTGG |
| | | TTCTGGGACGGATTACACTCTGACCATCAGCAGTC |
| | | TGCAACCGGAAGACTTCGCAACTTATTACTGTCAG |
| | | CAAGGTAATACTCTGCCGTGGACGTTCGGACAGGG |
| | | CACCAAGGTGGAGATCAAAGGCGGCGGCGGAAGTG |
| | | GAGGAGGAGGCTCAGGCGGAGGAGGGAGCGAGGTT |
| | | CAGCTGGTGGAGTCTGGCGGTGGCCTGGTGCAGCC |
| | | AGGGGGCTCACTCCGTTTGTCCTGTGCAGCTTCTG |
| | | GCTACTCCTTTACCGGCTACACTATGAACTGGGTG |
| | | CGTCAGGCCCCAGGTAAGGGCCTGGAATGGGTTGC |
| | | ACTGATTAATCCTACCAAAGGTGTTAGTACCTACA |
| | | ACCAGAAGTTCAAGGACCGTTTCACTATAAGCGTA |
| | | GATAAATCCAAAAACACAGCCTACCTGCAAATGAA |
| | | CAGCCTGCGTGCTGAGGACACTGCCGTCTATTATT |
| | | GTGCTAGAAGCGGATACTACGGCGATAGTGACTGG |
| | | TATTTTGACGTGTGGGGTCAAGGAACCCTGGTCAC |
| | | CGTCTCCTCGACATCTGGCGGCGGAGGATCTCTGG |
| | | AATCTGGACAGGTGCTGCTGGAAAGCAACATCAAG |
| | | GTGCTGCCCACCTGGTCTACCCCAGTTCAGCCTAT |
| | | GGCTCTGATTGTGCTTGGCGGAGTTGCCGGCCTGC |
| | | TGCTCTTTATCGGCCTGGGCATCTTCTTTTGCGTG |
| | | CGGTGCAGACATCGGCGGAGACAGGCTGAGAGAAT |
| | | GAGCCAGATCAAGCGGCTGCTGAGCGAGAAGAAAA |
| | | CCTGTCAGTGCCCTCACCGGTTCCAGAAAACATGC |
| | | AGCCCCATC |
| 621 | Nucleotide | ATGGCTCTGCCTGTGACAGCTCTGTTGCTGCCTCT |
| | | GGCTCTGCTGCTGCATGCTGCTAGACCTCAGGTGC |
| | | AGCTGAAGGAGAGCGGCGGCGGCCTGGTGAGGCCC |
| | | GGCGGCAGCCTGAAGCTGAGCTGCGCCGCCAGCGG |
| | | CTTCACCTTCAGCAACTACGGCATGAGCTGGATCA |
| | | GGCAGACCCCCGACAAGAACCTGGAGCTGGTGGCC |
| | | AGCATCAACACCAGCGGCGGCAACACCTACTACCC |
| | | CGACAGCGTGAAGGGCAGGTTCACCATCAGCAGGG |
| | | ACAACGCCAGGGCCACCCTGAACCTGCAGATGAGC |
| | | AACCTGAAGAGCGAGGACACCGCCATCTACTACTG |
| | | CACCAGGGGCGGCTTCACCCACTGGGGCCAGGGCA |
| | | CCCTGGTGGCCGTGAGCGCCGGCAGCACCAGCGGC |
| | | AGCGGCAAGCCCGGCAGCGGCGAGGGCAGCACCAA |
| | | GGGCCAGATCGTGCTGACCCAGAGCCCCGCCATCA |
| | | TGAGCGCCAGCCCCGGCGAGAAGGTGACCATGACC |
| | | TGCAGCGCCAGCAGCAGCGTGAGCTACATGTACTG |
| | | GTACCAGCAGAAGCCCGGCAGCAGCCCCAGGCTGC |
| | | TGATCTACGACACCAGCAACCTGGCCAGCGGCGTG |
| | | CCCGTGAGGTTCAGCGGCAGCGGCAGCGGCACCAG |
| | | CTACTTCCTGACCATCAGCAGGATGGAGGCCGAGG |
| | | ACGCCGCCACCTACTACTGCCAGCAGTGGACCGGC |
| | | TACCCCCCCATCACCTTCGGCGCCGGCACCAAGCT |
| | | GGAGCTGAGGGAGCAGAAACTGATCAGCGAGGAAG |
| | | ATCTGAATCCTGGCGGAGGCGGAGGAAGTGGTGGC |
| | | GGAGGTTCTGGTGGCGGTGGATCAGGCGGTGGCGG |
| | | ATCTGGATCTATGGATATCCAGATGACCCAGTCCC |
| | | CGAGCTCCCTGTCCGCCTCTGTGGGCGATAGGGTC |
| | | ACCATCACCTGCCGTGCCAGTCAGGACATCCGTAA |
| | | TTATCTGAACTGGTATCAACAGAAACCAGGAAAAG |
| | | CTCCGAAACTACTGATTTACTATACCTCCCGCCTG |
| | | GAGTCTGGAGTCCCTTCTCGCTTCTCTGGTTCTGG |
| | | TTCTGGGACGGATTACACTCTGACCATCAGCAGTC |
| | | TGCAACCGGAAGACTTCGCAACTTATTACTGTCAG |
| | | CAAGGTAATACTCTGCCGTGGACGTTCGGACAGGG |
| | | CACCAAGGTGGAGATCAAAGGCGGCGGCGGAAGTG |
| | | GAGGAGGAGGCTCAGGCGGAGGAGGGAGCGAGGTT |
| | | CAGCTGGTGGAGTCTGGCGGTGGCCTGGTGCAGCC |
| | | AGGGGGCTCACTCCGTTTGTCCTGTGCAGCTTCTG |
| | | GCTACTCCTTTACCGGCTACACTATGAACTGGGTG |
| | | CGTCAGGCCCCAGGTAAGGGCCTGGAATGGGTTGC |
| | | ACTGATTAATCCTACCAAAGGTGTTAGTACCTACA |
| | | ACCAGAAGTTCAAGGACCGTTTCACTATAAGCGTA |
| | | GATAAATCCAAAAACACAGCCTACCTGCAAATGAA |
| | | CAGCCTGCGTGCTGAGGACACTGCCGTCTATTATT |
| | | GTGCTAGAAGCGGATACTACGGCGATAGTGACTGG |
| | | TATTTTGACGTGTGGGGTCAAGGAACCCTGGTCAC |
| | | CGTCTCCTCGACATCTGGCGGCGGAGGATCTCTGG |
| | | AATCTGGACAGGTGCTGCTGGAAAGCAACATCAAG |
| | | GTGCTGCCCACCTGGTCTACCCCAGTTCAGCCTAT |
| | | GGCTCTGATTGTGCTTGGCGGAGTTGCCGGCCTGC |
| | | TGCTCTTTATCGGCCTGGGCATCTTCTTTTGCGTG |
| | | CGGTGCAGACATCGGCGGAGACAGGCTGAGAGAAT |
| | | GAGCCAGATCAAGCGGCTGCTGAGCGAGAAGAAAA |
| | | CCTGTCAGTGCCCTCACCGGTTCCAGAAAACATGC |
| | | AGCCCCATC |
| 622 | Nucleotide | ATGGCTCTGCCTGTGACAGCTCTGTTGCTGCCTCT |
| | | GGCTCTGCTGCTGCATGCTGCTAGACCTCAGGTGC |
| | | AGCTGAAGGAGAGCGGCGGCGGCCTGGTGCAGCCC |
| | | GGCGGCAGCCTGAAGCTGAGCTGCGCCGCCAGCGG |
| | | CTTCCCCTTCAGCAGCTACGGCCTGAGCTGGGTGA |
| | | GGCAGACCCCCGACAAGAGGCTGGAGCTGGTGGCC |
| | | ACCATCAACAGGAACGGCGACAGCGCCTACTACCC |
| | | CGACAGCGTGAAGGGCAGGTTCACCATCAGCAGGG |
| | | ACGACGCCAAGAACACCCTGTACCTGCAGATGAGC |
| | | AGCCTGAAGAGCGAGGACACCGCCATGTACTACTG |
| | | CACCAGGGGCGGCTTCGCCTACTGGGGCCAGGGCA |
| | | CCCTGGTGACCGTGAGCGCCGGCAGCACCAGCGGC |
| | | AGCGGCAAGCCCGGCAGCGGCGAGGGCAGCACCAA |
| | | GGGCCAGATCGTGCTGACCCAGAGCCCCGCCATCA |
| | | TGAGCGCCAGCCCCGGCGAGAAGGTGACCATGACC |
| | | TGCAGCGGCAGCAGCAGCGTGGGCTACATGTACTG |
| | | GTACCAGCAGAAGCCCGGCTTCAGCCCCAGGCTGC |
| | | TGATCTACGACACCAGCAACCTGGCCAGCGGCGTG |
| | | CCCGTGAGGTTCAGCGGCAGCGGCAGCGGCACCAG |
| | | CTACAGCCTGACCATCAGCAGGATGGAGGCCGAGG |
| | | ACGCCGCCACCTACTACTGCCAGCAGTGGAGCGGC |
| | | TACCCCCCCATCACCTTCGGCGCCGGCACCAAGCT |
| | | GGAGCTGAAGGAGCAGAAACTGATCAGCGAGGAAG |
| | | ATCTGAATCCTGGCGGAGGCGGAGGAAGTGGTGGC |
| | | GGAGGTTCTGGTGGCGGTGGATCAGGCGGTGGCGG |
| | | ATCTGGATCTATGGATATCCAGATGACCCAGTCCC |
| | | CGAGCTCCCTGTCCGCCTCTGTGGGCGATAGGGTC |
| | | ACCATCACCTGCCGTGCCAGTCAGGACATCCGTAA |
| | | TTATCTGAACTGGTATCAACAGAAACCAGGAAAAG |
| | | CTCCGAAACTACTGATTTACTATACCTCCCGCCTG |
| | | GAGTCTGGAGTCCCTTCTCGCTTCTCTGGTTCTGG |
| | | TTCTGGGACGGATTACACTCTGACCATCAGCAGTC |
| | | TGCAACCGGAAGACTTCGCAACTTATTACTGTCAG |
| | | CAAGGTAATACTCTGCCGTGGACGTTCGGACAGGG |
| | | CACCAAGGTGGAGATCAAAGGCGGCGGCGGAAGTG |
| | | GAGGAGGAGGCTCAGGCGGAGGAGGGAGCGAGGTT |
| | | CAGCTGGTGGAGTCTGGCGGTGGCCTGGTGCAGCC |
| | | AGGGGGCTCACTCCGTTTGTCCTGTGCAGCTTCTG |
| | | GCTACTCCTTTACCGGCTACACTATGAACTGGGTG |
| | | CGTCAGGCCCCAGGTAAGGGCCTGGAATGGGTTGC |
| | | ACTGATTAATCCTACCAAAGGTGTTAGTACCTACA |
| | | ACCAGAAGTTCAAGGACCGTTTCACTATAAGCGTA |
| | | GATAAATCCAAAAACACAGCCTACCTGCAAATGAA |
| | | CAGCCTGCGTGCTGAGGACACTGCCGTCTATTATT |
| | | GTGCTAGAAGCGGATACTACGGCGATAGTGACTGG |
| | | TATTTTGACGTGTGGGGTCAAGGAACCCTGGTCAC |
| | | CGTCTCCTCGACATCTGGCGGCGGAGGATCTCTGG |
| | | AATCTGGACAGGTGCTGCTGGAAAGCAACATCAAG |
| | | GTGCTGCCCACCTGGTCTACCCCAGTTCAGCCTAT |
| | | GGCTCTGATTGTGCTTGGCGGAGTTGCCGGCCTGC |
| | | TGCTCTTTATCGGCCTGGGCATCTTCTTTTGCGTG |
| | | CGGTGCAGACATCGGCGGAGACAGGCTGAGAGAAT |
| | | GAGCCAGATCAAGCGGCTGCTGAGCGAGAAGAAAA |
| | | CCTGTCAGTGCCCTCACCGGTTCCAGAAAACATGC |
| | | AGCCCCATC |
| 623 | Nucleotide | ATGGCTCTGCCTGTGACAGCTCTGTTGCTGCCTCT |
| | | GGCTCTGCTGCTGCATGCTGCTAGACCTGAGGTGA |
| | | AGCTGGTGGAGAGCGGCGGCGGCCTGGTGAGGCCC |
| | | GGCGGCAGCCTGAAGCTGAGCTGCGCCGCCAGCGG |
| | | CTTCACCTTCAGCAACTACGGCATGAGCTGGATCA |
| | | GGCAGACCCCCGACAAGAACCTGGAGCTGGTGGCC |
| | | AGCATCAACACCAGCGGCGGCAACACCTACTACCC |
| | | CGACAGCGTGAAGGGCAGGTTCACCATCAGCAGGG |
| | | ACAACGCCAGGGCCACCCTGAACCTGCAGATGAGC |
| | | AACCTGAAGAGCGAGGACACCGCCATCTACTACTG |
| | | CACCAGGGGCGGCTTCACCCACTGGGGCCAGGGCA |
| | | CCCTGGTGACCGTGAGCGCCGGCAGCACCAGCGGC |
| | | AGCGGCAAGCCCGGCAGCGGCGAGGGCAGCACCAA |
| | | GGGCGACATCGTGCTGACCCAGAGCCCCGCCATCA |
| | | TGAGCGCCAGCCCCGGCGAGAAGGTGACCATGACC |
| | | TGCAGCGCCAGCAGCAGCGTGGCCTTCATGTACTG |
| | | GTACCAGCAGAAGCCCGGCAGCAGCCCCAGGCTGC |
| | | TGATCTACGACACCAGCAAGCTGGCCAGCGGCGTG |
| | | CCCGTGAGGTTCAGCGGCAGCGGCAGCGGCACCAG |
| | | CTACAGCCTGACCATCAGCAGGATGGAGGCCGAGG |
| | | ACGCCGCCACCTACTACTGCCAGCAGTGGAGCGGC |
| | | TACCCCCCCATCACCTTCGGCGCCGGCACCAAGCT |
| | | GGAGCTGAAGGAGCAGAAACTGATCAGCGAGGAAG |
| | | ATCTGAATCCTGGCGGAGGCGGAGGAAGTGGTGGC |
| | | GGAGGTTCTGGTGGCGGTGGATCAGGCGGTGGCGG |
| | | ATCTGGATCTATGGATATCCAGATGACCCAGTCCC |
| | | CGAGCTCCCTGTCCGCCTCTGTGGGCGATAGGGTC |
| | | ACCATCACCTGCCGTGCCAGTCAGGACATCCGTAA |
| | | TTATCTGAACTGGTATCAACAGAAACCAGGAAAAG |
| | | CTCCGAAACTACTGATTTACTATACCTCCCGCCTG |
| | | GAGTCTGGAGTCCCTTCTCGCTTCTCTGGTTCTGG |
| | | TTCTGGGACGGATTACACTCTGACCATCAGCAGTC |
| | | TGCAACCGGAAGACTTCGCAACTTATTACTGTCAG |
| | | CAAGGTAATACTCTGCCGTGGACGTTCGGACAGGG |
| | | CACCAAGGTGGAGATCAAAGGCGGCGGCGGAAGTG |
| | | GAGGAGGAGGCTCAGGCGGAGGAGGGAGCGAGGTT |
| | | CAGCTGGTGGAGTCTGGCGGTGGCCTGGTGCAGCC |
| | | AGGGGGCTCACTCCGTTTGTCCTGTGCAGCTTCTG |
| | | GCTACTCCTTTACCGGCTACACTATGAACTGGGTG |
| | | CGTCAGGCCCCAGGTAAGGGCCTGGAATGGGTTGC |
| | | ACTGATTAATCCTACCAAAGGTGTTAGTACCTACA |
| | | ACCAGAAGTTCAAGGACCGTTTCACTATAAGCGTA |
| | | GATAAATCCAAAAACACAGCCTACCTGCAAATGAA |
| | | CAGCCTGCGTGCTGAGGACACTGCCGTCTATTATT |
| | | GTGCTAGAAGCGGATACTACGGCGATAGTGACTGG |
| | | TATTTTGACGTGTGGGGTCAAGGAACCCTGGTCAC |
| | | CGTCTCCTCGACATCTGGCGGCGGAGGATCTCTGG |
| | | AATCTGGACAGGTGCTGCTGGAAAGCAACATCAAG |
| | | GTGCTGCCCACCTGGTCTACCCCAGTTCAGCCTAT |
| | | GGCTCTGATTGTGCTTGGCGGAGTTGCCGGCCTGC |
| | | TGCTCTTTATCGGCCTGGGCATCTTCTTTTGCGTG |
| | | CGGTGCAGACATCGGCGGAGACAGGCTGAGAGAAT |
| | | GAGCCAGATCAAGCGGCTGCTGAGCGAGAAGAAAA |
| | | CCTGTCAGTGCCCTCACCGGTTCCAGAAAACATGC |
| | | AGCCCCATC |
| 624 | Nucleotide | ATGGCTCTGCCTGTGACAGCTCTGTTGCTGCCTCT |
| | | GGCTCTGCTGCTGCATGCTGCTAGACCTCAGGTGC |
| | | AGCTGAAGGAGAGCGGCGGCGGCCTGGTGCAGCCC |
| | | GGCGGCAGCCTGAAGCTGAGCTGCACCACCAGCGG |
| | | CTTCACCTTCAGCAGCTACGGCCTGAGCTGGATCA |
| | | GGCAGACCCCCGACAAGAGGCTGGAGCTGGTGGCC |
| | | AGCATCAACAGGAACGGCGACAACACCTACTACAC |
| | | CGACAGCGTGAGGGGCAGGTTCACCATCAGCAGGG |
| | | ACAACGCCAAGAGCACCCTGAACCTGCAGATGAGC |
| | | AGCCTGAAGAGCGAGGACACCGCCATGTACTACTG |
| | | CACCAGGGGCGGCTTCAGCTACTGGGGCCAGGGCA |
| | | CCCTGGTGACCGTGAGCGCCGGCAGCACCAGCGGC |
| | | AGCGGCAAGCCCGGCAGCGGCGAGGGCAGCACCAA |
| | | GGGCCAGATCGTGCTGACCCAGAGCCCCCCCCTGA |
| | | TGAGCGCCAGCCCCGGCGAGAAGGTGACCATGACC |
| | | TGCAGCGCCAGCAGCAGCGTGGGCTACATGTACTG |
| | | GTTCCAGCAGAGGCCCGGCAGCAGCCCCAGGCTGC |
| | | TGATCTACGACACCTACAACCTGGCCAGCGGCGTG |
| | | CCCGTGAGGTTCAGCGGCAGCGGCAGCGGCACCAG |
| | | CTACAGCCTGACCATCAGCAGGCTGGAGGCCGAGG |
| | | ACGCCGCCACCTACTACTGCCAGCAGTGGAGCGGC |
| | | TACCCCCCCATCACCTTCGGCGCCGGCACCAAGCT |
| | | GGAGCTGAGGGAGCAGAAACTGATCAGCGAGGAAG |
| | | ATCTGAATCCTGGCGGAGGCGGAGGAAGTGGTGGC |
| | | GGAGGTTCTGGTGGCGGTGGATCAGGCGGTGGCGG |
| | | ATCTGGATCTATGGATATCCAGATGACCCAGTCCC |
| | | CGAGCTCCCTGTCCGCCTCTGTGGGCGATAGGGTC |
| | | ACCATCACCTGCCGTGCCAGTCAGGACATCCGTAA |
| | | TTATCTGAACTGGTATCAACAGAAACCAGGAAAAG |
| | | CTCCGAAACTACTGATTTACTATACCTCCCGCCTG |
| | | GAGTCTGGAGTCCCTTCTCGCTTCTCTGGTTCTGG |
| | | TTCTGGGACGGATTACACTCTGACCATCAGCAGTC |
| | | TGCAACCGGAAGACTTCGCAACTTATTACTGTCAG |
| | | CAAGGTAATACTCTGCCGTGGACGTTCGGACAGGG |
| | | CACCAAGGTGGAGATCAAAGGCGGCGGCGGAAGTG |
| | | GAGGAGGAGGCTCAGGCGGAGGAGGGAGCGAGGTT |
| | | CAGCTGGTGGAGTCTGGCGGTGGCCTGGTGCAGCC |
| | | AGGGGGCTCACTCCGTTTGTCCTGTGCAGCTTCTG |
| | | GCTACTCCTTTACCGGCTACACTATGAACTGGGTG |
| | | CGTCAGGCCCCAGGTAAGGGCCTGGAATGGGTTGC |
| | | ACTGATTAATCCTACCAAAGGTGTTAGTACCTACA |
| | | ACCAGAAGTTCAAGGACCGTTTCACTATAAGCGTA |
| | | GATAAATCCAAAAACACAGCCTACCTGCAAATGAA |
| | | CAGCCTGCGTGCTGAGGACACTGCCGTCTATTATT |
| | | GTGCTAGAAGCGGATACTACGGCGATAGTGACTGG |
| | | TATTTTGACGTGTGGGGTCAAGGAACCCTGGTCAC |
| | | CGTCTCCTCGACATCTGGCGGCGGAGGATCTCTGG |
| | | AATCTGGACAGGTGCTGCTGGAAAGCAACATCAAG |
| | | GTGCTGCCCACCTGGTCTACCCCAGTTCAGCCTAT |
| | | GGCTCTGATTGTGCTTGGCGGAGTTGCCGGCCTGC |
| | | TGCTCTTTATCGGCCTGGGCATCTTCTTTTGCGTG |
| | | CGGTGCAGACATCGGCGGAGACAGGCTGAGAGAAT |
| | | GAGCCAGATCAAGCGGCTGCTGAGCGAGAAGAAAA |
| | | CCTGTCAGTGCCCTCACCGGTTCCAGAAAACATGC |
| | | AGCCCCATC |
| 625 | Nucleotide | ATGGCTCTGCCTGTGACAGCTCTGTTGCTGCCTCT |
| | | GGCTCTGCTGCTGCATGCTGCTAGACCTGAGGTGA |
| | | AGCTGGTGGAGAGCGGCGGCGGCCTGGTGCAGCCC |
| | | GGCGGCAGCCTGAAGCTGAGCTGCGCCGCCAGCGG |
| | | CTTCACCTTCAGCAGCTACGGCCTGAGCTGGGTGA |
| | | GGCAGACCCCCGACAAGAGGCTGGAGCTGGTGGCC |
| | | AGCGTGAACAGGAACGGCGGCAACACCTACTACAC |
| | | CGACAGCGTGAAGGGCAGGTTCACCATCAGCAGGG |
| | | ACAACGCCAAGAACACCCTGAACCTGCAGATGAGC |
| | | AGCCTGAAGAGCGAGGACACCGCCATGTACTACTG |
| | | CGCCAGGGGCGGCTTCACCTACTGGGGCCAGGGCA |
| | | CCCTGGTGACCGTGAGCGCCGGCAGCACCAGCGGC |
| | | AGCGGCAAGCCCGGCAGCGGCGAGGGCAGCACCAA |
| | | GGGCCAGATCGTGCTGACCCAGAGCCCCGCCATCA |
| | | TGAGCGCCAGCCCCGGCGAGAAGGTGACCATGACC |
| | | TGCAGCGCCAGCAGCAGCGTGGGCTACATGTACTG |
| | | GTACCAGCAGAAGCCCGGCAGCAGCCCCAGGCTGC |
| | | TGATCTACGACACCAGCCACCTGGCCAGCGGCGTG |
| | | CCCGTGAGGTTCAGCGGCAGCGGCAGCGGCACCAG |
| | | CTACAGCCTGACCATCAGCAGGATGGAGGCCGAGG |
| | | ACGCCGCCACCTACTACTGCCAGCAGTGGAGCGGC |
| | | TACCCCCCCATCACCTTCGGCGCCGGCACCAAGCT |
| | | GGAGCTGAAGGAGCAGAAACTGATCAGCGAGGAAG |
| | | ATCTGAATCCTGGCGGAGGCGGAGGAAGTGGTGGC |
| | | GGAGGTTCTGGTGGCGGTGGATCAGGCGGTGGCGG |
| | | ATCTGGATCTATGGATATCCAGATGACCCAGTCCC |
| | | CGAGCTCCCTGTCCGCCTCTGTGGGCGATAGGGTC |
| | | ACCATCACCTGCCGTGCCAGTCAGGACATCCGTAA |
| | | TTATCTGAACTGGTATCAACAGAAACCAGGAAAAG |
| | | CTCCGAAACTACTGATTTACTATACCTCCCGCCTG |
| | | GAGTCTGGAGTCCCTTCTCGCTTCTCTGGTTCTGG |
| | | TTCTGGGACGGATTACACTCTGACCATCAGCAGTC |
| | | TGCAACCGGAAGACTTCGCAACTTATTACTGTCAG |
| | | CAAGGTAATACTCTGCCGTGGACGTTCGGACAGGG |
| | | CACCAAGGTGGAGATCAAAGGCGGCGGCGGAAGTG |
| | | GAGGAGGAGGCTCAGGCGGAGGAGGGAGCGAGGTT |
| | | CAGCTGGTGGAGTCTGGCGGTGGCCTGGTGCAGCC |
| | | AGGGGGCTCACTCCGTTTGTCCTGTGCAGCTTCTG |
| | | GCTACTCCTTTACCGGCTACACTATGAACTGGGTG |
| | | CGTCAGGCCCCAGGTAAGGGCCTGGAATGGGTTGC |
| | | ACTGATTAATCCTACCAAAGGTGTTAGTACCTACA |
| | | ACCAGAAGTTCAAGGACCGTTTCACTATAAGCGTA |
| | | GATAAATCCAAAAACACAGCCTACCTGCAAATGAA |
| | | CAGCCTGCGTGCTGAGGACACTGCCGTCTATTATT |
| | | GTGCTAGAAGCGGATACTACGGCGATAGTGACTGG |
| | | TATTTTGACGTGTGGGGTCAAGGAACCCTGGTCAC |
| | | CGTCTCCTCGACATCTGGCGGCGGAGGATCTCTGG |
| | | AATCTGGACAGGTGCTGCTGGAAAGCAACATCAAG |
| | | GTGCTGCCCACCTGGTCTACCCCAGTTCAGCCTAT |
| | | GGCTCTGATTGTGCTTGGCGGAGTTGCCGGCCTGC |
| | | TGCTCTTTATCGGCCTGGGCATCTTCTTTTGCGTG |
| | | CGGTGCAGACATCGGCGGAGACAGGCTGAGAGAAT |
| | | GAGCCAGATCAAGCGGCTGCTGAGCGAGAAGAAAA |
| | | CCTGTCAGTGCCCTCACCGGTTCCAGAAAACATGC |
| | | AGCCCCATC |
| 626 | Nucleotide | ATGGCTCTGCCTGTGACAGCTCTGTTGCTGCCTCT |
| | | GGCTCTGCTGCTGCATGCTGCTAGACCTGAGGTGA |
| | | AGCTGGTGGAGAGCGGCGGCGGCCTGGTGCAGCCC |
| | | GGCGGCAGCCTGAAGCTGAGCTGCGCCGCCAGCGG |
| | | CTTCCCCTTCAGCAGCTACGGCCTGAGCTGGGTGA |
| | | GGCAGACCCCCGACAAGAGGCTGGAGCTGGTGGCC |
| | | ACCATCAACAGGAACGGCGACAGCGCCTACTACCC |
| | | CGACAGCGTGAAGGGCAGGTTCACCATCAGCAGGG |
| | | ACGACGCCAAGAACACCCTGTACCTGCAGATGAGC |
| | | AGCCTGAAGAGCGAGGACACCGCCATGTACTACTG |
| | | CACCAGGGGCGGCTTCGCCTACTGGGGCCAGGGCA |
| | | CCCTGGTGACCGTGAGCGCCGGCAGCACCAGCGGC |
| | | AGCGGCAAGCCCGGCAGCGGCGAGGGCAGCACCAA |
| | | GGGCCAGATCGTGCTGACCCAGAGCCCCGTGATCA |
| | | TGAGCGCCAGCCCCGGCGAGAAGGTGACCATGACC |
| | | TGCAGCGCCAGCAGCAGCGTGGGCTACATGTACTG |
| | | GTACCAGCAGAGGCCCGGCAGCAGCCCCAGGCTGC |
| | | TGATCTACGACACCAGCAACCTGGCCAGCGGCGCC |
| | | CCCGTGAGGTTCAGCGGCAGCGGCAGCGGCACCAG |
| | | CTACAGCCTGACCATCAGCAGGATGGAGGCCGAGG |
| | | ACGCCGCCACCTACTACTGCCAGCAGTGGAGCGGC |
| | | TACCCCCCCATCACCTTCGGCGCCGGCACCAAGCT |
| | | GGAGCTGAAGGAGCAGAAACTGATCAGCGAGGAAG |
| | | ATCTGAATCCTGGCGGAGGCGGAGGAAGTGGTGGC |
| | | GGAGGTTCTGGTGGCGGTGGATCAGGCGGTGGCGG |
| | | ATCTGGATCTATGGATATCCAGATGACCCAGTCCC |
| | | CGAGCTCCCTGTCCGCCTCTGTGGGCGATAGGGTC |
| | | ACCATCACCTGCCGTGCCAGTCAGGACATCCGTAA |
| | | TTATCTGAACTGGTATCAACAGAAACCAGGAAAAG |
| | | CTCCGAAACTACTGATTTACTATACCTCCCGCCTG |
| | | GAGTCTGGAGTCCCTTCTCGCTTCTCTGGTTCTGG |
| | | TTCTGGGACGGATTACACTCTGACCATCAGCAGTC |
| | | TGCAACCGGAAGACTTCGCAACTTATTACTGTCAG |
| | | CAAGGTAATACTCTGCCGTGGACGTTCGGACAGGG |
| | | CACCAAGGTGGAGATCAAAGGCGGCGGCGGAAGTG |
| | | GAGGAGGAGGCTCAGGCGGAGGAGGGAGCGAGGTT |
| | | CAGCTGGTGGAGTCTGGCGGTGGCCTGGTGCAGCC |
| | | AGGGGGCTCACTCCGTTTGTCCTGTGCAGCTTCTG |
| | | GCTACTCCTTTACCGGCTACACTATGAACTGGGTG |
| | | CGTCAGGCCCCAGGTAAGGGCCTGGAATGGGTTGC |
| | | ACTGATTAATCCTACCAAAGGTGTTAGTACCTACA |
| | | ACCAGAAGTTCAAGGACCGTTTCACTATAAGCGTA |
| | | GATAAATCCAAAAACACAGCCTACCTGCAAATGAA |
| | | CAGCCTGCGTGCTGAGGACACTGCCGTCTATTATT |
| | | GTGCTAGAAGCGGATACTACGGCGATAGTGACTGG |
| | | TATTTTGACGTGTGGGGTCAAGGAACCCTGGTCAC |
| | | CGTCTCCTCGACATCTGGCGGCGGAGGATCTCTGG |
| | | AATCTGGACAGGTGCTGCTGGAAAGCAACATCAAG |
| | | GTGCTGCCCACCTGGTCTACCCCAGTTCAGCCTAT |
| | | GGCTCTGATTGTGCTTGGCGGAGTTGCCGGCCTGC |
| | | TGCTCTTTATCGGCCTGGGCATCTTCTTTTGCGTG |
| | | CGGTGCAGACATCGGCGGAGACAGGCTGAGAGAAT |
| | | GAGCCAGATCAAGCGGCTGCTGAGCGAGAAGAAAA |
| | | CCTGTCAGTGCCCTCACCGGTTCCAGAAAACATGC |
| | | AGCCCCATC |
| 627 | Nucleotide | ATGGCTCTGCCTGTGACAGCTCTGTTGCTGCCTCT |
| | | GGCTCTGCTGCTGCATGCTGCTAGACCTGAGGTGA |
| | | AGCTGGTGGAGAGCGGCGGCGGCCTGGTGCAGCCC |
| | | GGCGGCAGCCTGAAGCTGAGCTGCACCACCAGCGG |
| | | CTTCACCTTCAGCAGCTACGGCCTGAGCTGGATCA |
| | | GGCAGACCCCCGACAAGAGGCTGGAGCTGGTGGCC |
| | | AGCATCAACAGGAACGGCGACAACACCTACTACAC |
| | | CGACAGCGTGAAGGGCAGGTTCACCATCAGCAGGG |
| | | ACAACGCCAAGAACACCCTGAACCTGCAGATGAGC |
| | | AGCCTGAAGAGCGAGGACACCGCCATGTACTACTG |
| | | CACCAGGGGCGGCTTCAGCTACTGGGGCCAGGGCA |
| | | CCCTGGTGACCGTGAGCGCCGGCAGCACCAGCGGC |
| | | AGCGGCAAGCCCGGCAGCGGCGAGGGCAGCACCAA |
| | | GGGCCAGATCGTGCTGACCCAGAGCCCCGCCATCA |
| | | TGAGCGCCAGCCCCGGCGAGAAGGTGACCATGACC |
| | | TGCAGCGCCAGCAGCAGCGTGAGCTACATGTACTG |
| | | GTACCAGCAGAAGCCCGGCAGCAGCCCCAGGCTGC |
| | | TGATCTACGACACCAGCAACCTGGCCAGCGGCGTG |
| | | CCCGTGAGGTTCAGCGGCAGCGGCAGCGGCACCAG |
| | | CTACAGCCTGACCATCAGCAGGATGGAGGCCGAGG |
| | | ACGCCGCCACCTACTACTGCCAGCAGTGGACCGGC |
| | | TACCCCCCCATCACCTTCGGCGCCGGCACCAAGCT |
| | | GGAGCTGAAGGAGCAGAAACTGATCAGCGAGGAAG |
| | | ATCTGAATCCTGGCGGAGGCGGAGGAAGTGGTGGC |
| | | GGAGGTTCTGGTGGCGGTGGATCAGGCGGTGGCGG |
| | | ATCTGGATCTATGGATATCCAGATGACCCAGTCCC |
| | | CGAGCTCCCTGTCCGCCTCTGTGGGCGATAGGGTC |
| | | ACCATCACCTGCCGTGCCAGTCAGGACATCCGTAA |
| | | TTATCTGAACTGGTATCAACAGAAACCAGGAAAAG |
| | | CTCCGAAACTACTGATTTACTATACCTCCCGCCTG |
| | | GAGTCTGGAGTCCCTTCTCGCTTCTCTGGTTCTGG |
| | | TTCTGGGACGGATTACACTCTGACCATCAGCAGTC |
| | | TGCAACCGGAAGACTTCGCAACTTATTACTGTCAG |
| | | CAAGGTAATACTCTGCCGTGGACGTTCGGACAGGG |
| | | CACCAAGGTGGAGATCAAAGGCGGCGGCGGAAGTG |
| | | GAGGAGGAGGCTCAGGCGGAGGAGGGAGCGAGGTT |
| | | CAGCTGGTGGAGTCTGGCGGTGGCCTGGTGCAGCC |
| | | AGGGGGCTCACTCCGTTTGTCCTGTGCAGCTTCTG |
| | | GCTACTCCTTTACCGGCTACACTATGAACTGGGTG |
| | | CGTCAGGCCCCAGGTAAGGGCCTGGAATGGGTTGC |
| | | ACTGATTAATCCTACCAAAGGTGTTAGTACCTACA |
| | | ACCAGAAGTTCAAGGACCGTTTCACTATAAGCGTA |
| | | GATAAATCCAAAAACACAGCCTACCTGCAAATGAA |
| | | CAGCCTGCGTGCTGAGGACACTGCCGTCTATTATT |
| | | GTGCTAGAAGCGGATACTACGGCGATAGTGACTGG |
| | | TATTTTGACGTGTGGGGTCAAGGAACCCTGGTCAC |
| | | CGTCTCCTCGACATCTGGCGGCGGAGGATCTCTGG |
| | | AATCTGGACAGGTGCTGCTGGAAAGCAACATCAAG |
| | | GTGCTGCCCACCTGGTCTACCCCAGTTCAGCCTAT |
| | | GGCTCTGATTGTGCTTGGCGGAGTTGCCGGCCTGC |
| | | TGCTCTTTATCGGCCTGGGCATCTTCTTTTGCGTG |
| | | CGGTGCAGACATCGGCGGAGACAGGCTGAGAGAAT |
| | | GAGCCAGATCAAGCGGCTGCTGAGCGAGAAGAAAA |
| | | CCTGTCAGTGCCCTCACCGGTTCCAGAAAACATGC |
| | | AGCCCCATC |
| 628 | Nucleotide | ATGGCTCTGCCTGTGACAGCTCTGTTGCTGCCTCT |
| | | GGCTCTGCTGCTGCATGCTGCTAGACCTGAGGTGA |
| | | AGCTGGTGGAGAGCGGCGGCGTGCTGGTGCAGCCC |
| | | GGCGGCAGCCTGAAGCTGAGCTGCGCCGCCAGCGG |
| | | CTTCACCTTCAGCAGCTACGGCATGAGCTGGGTGA |
| | | GGCAGACCCCCGACAAGAGGCTGGAGCTGGTGGCC |
| | | AGCATCAACAAGAACGGCGGCAGCACCTACTACCC |
| | | CGACAGCGTGAAGGGCAGGTTCACCATCAGCAGGG |
| | | ACAACGCCAAGACCACCGTGTACCTGCAGATGAGC |
| | | AGCCTGAAGAGCGAGGACACCGCCATGTACTACTG |
| | | CACCAGGGGCGGCTTCGCCTACTGGGGCCAGGGCA |
| | | CCCTGGTGACCGTGAGCGCCGGCAGCACCAGCGGC |
| | | AGCGGCAAGCCCGGCAGCGGCGAGGGCAGCACCAA |
| | | GGGCCAGATCGTGCTGACCCAGAGCCCCGCCATCA |
| | | TGAGCGCCAGCCCCGGCGAGAAGGTGACCCTGACC |
| | | TGCAGCGCCAGCAGCAGCGTGGGCTACATGTACTG |
| | | GTACCAGCAGAGGCCCGGCAGCAGCCCCAGGCTGC |
| | | TGATCTACGACACCAGCAACCTGCCCAGCGGCGTG |
| | | CCCGTGAGGTTCAGCGGCAGCGGCAGCGGCACCAG |
| | | CTACAGCCTGACCATCAGCAGGATGGAGGCCGAGG |
| | | ACGCCGCCACCTACTACTGCCAGCAGTGGAGCGGC |
| | | TACCCCCCCATCACCTTCGGCGCCGGCACCAAGCT |
| | | GGAGCTGAAGGAGCAGAAACTGATCAGCGAGGAAG |
| | | ATCTGAATCCTGGCGGAGGCGGAGGAAGTGGTGGC |
| | | GGAGGTTCTGGTGGCGGTGGATCAGGCGGTGGCGG |
| | | ATCTGGATCTATGGATATCCAGATGACCCAGTCCC |
| | | CGAGCTCCCTGTCCGCCTCTGTGGGCGATAGGGTC |
| | | ACCATCACCTGCCGTGCCAGTCAGGACATCCGTAA |
| | | TTATCTGAACTGGTATCAACAGAAACCAGGAAAAG |
| | | CTCCGAAACTACTGATTTACTATACCTCCCGCCTG |
| | | GAGTCTGGAGTCCCTTCTCGCTTCTCTGGTTCTGG |
| | | TTCTGGGACGGATTACACTCTGACCATCAGCAGTC |
| | | TGCAACCGGAAGACTTCGCAACTTATTACTGTCAG |
| | | CAAGGTAATACTCTGCCGTGGACGTTCGGACAGGG |
| | | CACCAAGGTGGAGATCAAAGGCGGCGGCGGAAGTG |
| | | GAGGAGGAGGCTCAGGCGGAGGAGGGAGCGAGGTT |
| | | CAGCTGGTGGAGTCTGGCGGTGGCCTGGTGCAGCC |
| | | AGGGGGCTCACTCCGTTTGTCCTGTGCAGCTTCTG |
| | | GCTACTCCTTTACCGGCTACACTATGAACTGGGTG |
| | | CGTCAGGCCCCAGGTAAGGGCCTGGAATGGGTTGC |
| | | ACTGATTAATCCTACCAAAGGTGTTAGTACCTACA |
| | | ACCAGAAGTTCAAGGACCGTTTCACTATAAGCGTA |
| | | GATAAATCCAAAAACACAGCCTACCTGCAAATGAA |
| | | CAGCCTGCGTGCTGAGGACACTGCCGTCTATTATT |
| | | GTGCTAGAAGCGGATACTACGGCGATAGTGACTGG |
| | | TATTTTGACGTGTGGGGTCAAGGAACCCTGGTCAC |
| | | CGTCTCCTCGACATCTGGCGGCGGAGGATCTCTGG |
| | | AATCTGGACAGGTGCTGCTGGAAAGCAACATCAAG |
| | | GTGCTGCCCACCTGGTCTACCCCAGTTCAGCCTAT |
| | | GGCTCTGATTGTGCTTGGCGGAGTTGCCGGCCTGC |
| | | TGCTCTTTATCGGCCTGGGCATCTTCTTTTGCGTG |
| | | CGGTGCAGACATCGGCGGAGACAGGCTGAGAGAAT |
| | | GAGCCAGATCAAGCGGCTGCTGAGCGAGAAGAAAA |
| | | CCTGTCAGTGCCCTCACCGGTTCCAGAAAACATGC |
| | | AGCCCCATC |
| 629 | Nucleotide | ATGGCTCTGCCTGTGACAGCTCTGTTGCTGCCTCT |
| | | GGCTCTGCTGCTGCATGCTGCTAGACCTCAGCTGC |
| | | AGCTGCAGGAGAGCGGCGGCGGCCTGGTGCAGGCC |
| | | GGCGGCAGCCTGAGGCTGAGCTGCGCCGCCAGCGG |
| | | CAGGACCGGCAGCAGCTACGCCATGGGCTGGTTCA |
| | | GGCAGGCCCCCGGCAAGGAGAGGGAGTTCGTGGCC |
| | | GCCATCACCTGGAGCGGCGGCATCACCGCCTACGC |
| | | CGACAGCGTGAAGGGCAGGTTCACCATCAGCAGGG |
| | | ACAACGCCAAGAACACCGTGTACCTGCAGATGAAC |
| | | AGCCTGAAGCCCGAGGACACCGCCGTGTACTGCTG |
| | | CGCCGCCGGCGTGACCGGCAGCCCCAGCTTCGACA |
| | | GCTGGGGCCAGGGCACCCAGGTGACCGTGAGCAGC |
| | | GAGCAGAAACTGATCAGCGAGGAAGATCTGAATCC |
| | | TGGCGGAGGCGGAGGAAGTGGTGGCGGAGGTTCTG |
| | | GTGGCGGTGGATCAGGCGGTGGCGGATCTGGATCT |
| | | ATGGATATCCAGATGACCCAGTCCCCGAGCTCCCT |
| | | GTCCGCCTCTGTGGGCGATAGGGTCACCATCACCT |
| | | GCCGTGCCAGTCAGGACATCCGTAATTATCTGAAC |
| | | TGGTATCAACAGAAACCAGGAAAAGCTCCGAAACT |
| | | ACTGATTTACTATACCTCCCGCCTGGAGTCTGGAG |
| | | TCCCTTCTCGCTTCTCTGGTTCTGGTTCTGGGACG |
| | | GATTACACTCTGACCATCAGCAGTCTGCAACCGGA |
| | | AGACTTCGCAACTTATTACTGTCAGCAAGGTAATA |
| | | CTCTGCCGTGGACGTTCGGACAGGGCACCAAGGTG |
| | | GAGATCAAAGGCGGCGGCGGAAGTGGAGGAGGAGG |
| | | CTCAGGCGGAGGAGGGAGCGAGGTTCAGCTGGTGG |
| | | AGTCTGGCGGTGGCCTGGTGCAGCCAGGGGGCTCA |
| | | CTCCGTTTGTCCTGTGCAGCTTCTGGCTACTCCTT |
| | | TACCGGCTACACTATGAACTGGGTGCGTCAGGCCC |
| | | CAGGTAAGGGCCTGGAATGGGTTGCACTGATTAAT |
| | | CCTACCAAAGGTGTTAGTACCTACAACCAGAAGTT |
| | | CAAGGACCGTTTCACTATAAGCGTAGATAAATCCA |
| | | AAAACACAGCCTACCTGCAAATGAACAGCCTGCGT |
| | | GCTGAGGACACTGCCGTCTATTATTGTGCTAGAAG |
| | | CGGATACTACGGCGATAGTGACTGGTATTTTGACG |
| | | TGTGGGGTCAAGGAACCCTGGTCACCGTCTCCTCG |
| | | ACATCTGGCGGCGGAGGATCTCTGGAATCTGGACA |
| | | GGTGCTGCTGGAAAGCAACATCAAGGTGCTGCCCA |
| | | CCTGGTCTACCCCAGTTCAGCCTATGGCTCTGATT |
| | | GTGCTTGGCGGAGTTGCCGGCCTGCTGCTCTTTAT |
| | | CGGCCTGGGCATCTTCTTTTGCGTGCGGTGCAGAC |
| | | ATCGGCGGAGACAGGCTGAGAGAATGAGCCAGATC |
| | | AAGCGGCTGCTGAGCGAGAAGAAAACCTGTCAGTG |
| | | CCCTCACCGGTTCCAGAAAACATGCAGCCCCATC |
| 630 | Nucleotide | ATGGCTCTGCCTGTGACAGCTCTGTTGCTGCCTCT |
| | | GGCTCTGCTGCTGCATGCTGCTAGACCTCAGGTGC |
| | | AGCTGCAGGAGAGCGGCGGCGGCCTGGTGCAGGCC |
| | | GGCGGCAGCCTGAGGCTGAGCTGCGCCGCCAGCGG |
| | | CAGGACCTTCAGCAGCTACGCCATGGGCTGGTTCA |
| | | GGCAGGCCCCCGGCAAGGAGAGGGAGTTCGTGGCC |
| | | GCCATCAGCGGCAGCGGCGGCAGCATCTACTACGG |
| | | CGACAGCGTGAAGGGCAGGTTCACCATCAGCAGGG |
| | | ACAACGCCAAGAACACCATGTACCTGCAGATGAAC |
| | | AGGCTGAAGCCCGAGGACACCGCCGTGTACTACTG |
| | | CGCCGCCGGCCCCCTGGGCAGCCCCGACTTCGACA |
| | | GCTGGGGCCAGGGCACCCAGGTGACCGTGAGCAGC |
| | | GAGCAGAAACTGATCAGCGAGGAAGATCTGAATCC |
| | | TGGCGGAGGCGGAGGAAGTGGTGGCGGAGGTTCTG |
| | | GTGGCGGTGGATCAGGCGGTGGCGGATCTGGATCT |
| | | ATGGATATCCAGATGACCCAGTCCCCGAGCTCCCT |
| | | GTCCGCCTCTGTGGGCGATAGGGTCACCATCACCT |
| | | GCCGTGCCAGTCAGGACATCCGTAATTATCTGAAC |
| | | TGGTATCAACAGAAACCAGGAAAAGCTCCGAAACT |
| | | ACTGATTTACTATACCTCCCGCCTGGAGTCTGGAG |
| | | TCCCTTCTCGCTTCTCTGGTTCTGGTTCTGGGACG |
| | | GATTACACTCTGACCATCAGCAGTCTGCAACCGGA |
| | | AGACTTCGCAACTTATTACTGTCAGCAAGGTAATA |
| | | CTCTGCCGTGGACGTTCGGACAGGGCACCAAGGTG |
| | | GAGATCAAAGGCGGCGGCGGAAGTGGAGGAGGAGG |
| | | CTCAGGCGGAGGAGGGAGCGAGGTTCAGCTGGTGG |
| | | AGTCTGGCGGTGGCCTGGTGCAGCCAGGGGGCTCA |
| | | CTCCGTTTGTCCTGTGCAGCTTCTGGCTACTCCTT |
| | | TACCGGCTACACTATGAACTGGGTGCGTCAGGCCC |
| | | CAGGTAAGGGCCTGGAATGGGTTGCACTGATTAAT |
| | | CCTACCAAAGGTGTTAGTACCTACAACCAGAAGTT |
| | | CAAGGACCGTTTCACTATAAGCGTAGATAAATCCA |
| | | AAAACACAGCCTACCTGCAAATGAACAGCCTGCGT |
| | | GCTGAGGACACTGCCGTCTATTATTGTGCTAGAAG |
| | | CGGATACTACGGCGATAGTGACTGGTATTTTGACG |
| | | TGTGGGGTCAAGGAACCCTGGTCACCGTCTCCTCG |
| | | ACATCTGGCGGCGGAGGATCTCTGGAATCTGGACA |
| | | GGTGCTGCTGGAAAGCAACATCAAGGTGCTGCCCA |
| | | CCTGGTCTACCCCAGTTCAGCCTATGGCTCTGATT |
| | | GTGCTTGGCGGAGTTGCCGGCCTGCTGCTCTTTAT |
| | | CGGCCTGGGCATCTTCTTTTGCGTGCGGTGCAGAC |
| | | ATCGGCGGAGACAGGCTGAGAGAATGAGCCAGATC |
| | | AAGCGGCTGCTGAGCGAGAAGAAAACCTGTCAGTG |
| | | CCCTCACCGGTTCCAGAAAACATGCAGCCCCATC |
| 631 | Nucleotide | ATGGCTCTGCCTGTGACAGCTCTGTTGCTGCCTCT |
| | | GGCTCTGCTGCTGCATGCTGCTAGACCTGAGGTGC |
| | | AGGTGGTGGAGAGCGGCGGCGGCCTGGTGCAGCCC |
| | | GGCGGCAGCCTGAGGCTGAGCTGCGTGGCCAGCGG |
| | | CAGGACCTTCAGCAGCTACGCCATGGGCTGGTTCA |
| | | GGCAGGCCCCCGGCAAGGAGAGGGAGTTCGTGGCC |
| | | GCCATCAGCGGCAGCGGCGGCAGCATCTACTACGG |
| | | CGACAGCGTGAAGGGCAGGTTCACCATCAGCAGGG |
| | | ACAACGCCAAGAACACCATGTACCTGCAGATGAAC |
| | | AGGCTGAAGCCCGAGGACACCGCCGTGTACTACTG |
| | | CGCCGCCGGCCCCCTGGGCAGCCCCGACTTCGACA |
| | | GCTGGGGCCAGGGCACCCAGGTGACCGTGAGCAGC |
| | | GAGCAGAAACTGATCAGCGAGGAAGATCTGAATCC |
| | | TGGCGGAGGCGGAGGAAGTGGTGGCGGAGGTTCTG |
| | | GTGGCGGTGGATCAGGCGGTGGCGGATCTGGATCT |
| | | ATGGATATCCAGATGACCCAGTCCCCGAGCTCCCT |
| | | GTCCGCCTCTGTGGGCGATAGGGTCACCATCACCT |
| | | GCCGTGCCAGTCAGGACATCCGTAATTATCTGAAC |
| | | TGGTATCAACAGAAACCAGGAAAAGCTCCGAAACT |
| | | ACTGATTTACTATACCTCCCGCCTGGAGTCTGGAG |
| | | TCCCTTCTCGCTTCTCTGGTTCTGGTTCTGGGACG |
| | | GATTACACTCTGACCATCAGCAGTCTGCAACCGGA |
| | | AGACTTCGCAACTTATTACTGTCAGCAAGGTAATA |
| | | CTCTGCCGTGGACGTTCGGACAGGGCACCAAGGTG |
| | | GAGATCAAAGGCGGCGGCGGAAGTGGAGGAGGAGG |
| | | CTCAGGCGGAGGAGGGAGCGAGGTTCAGCTGGTGG |
| | | AGTCTGGCGGTGGCCTGGTGCAGCCAGGGGGCTCA |
| | | CTCCGTTTGTCCTGTGCAGCTTCTGGCTACTCCTT |
| | | TACCGGCTACACTATGAACTGGGTGCGTCAGGCCC |
| | | CAGGTAAGGGCCTGGAATGGGTTGCACTGATTAAT |
| | | CCTACCAAAGGTGTTAGTACCTACAACCAGAAGTT |
| | | CAAGGACCGTTTCACTATAAGCGTAGATAAATCCA |
| | | AAAACACAGCCTACCTGCAAATGAACAGCCTGCGT |
| | | GCTGAGGACACTGCCGTCTATTATTGTGCTAGAAG |
| | | CGGATACTACGGCGATAGTGACTGGTATTTTGACG |
| | | TGTGGGGTCAAGGAACCCTGGTCACCGTCTCCTCG |
| | | ACATCTGGCGGCGGAGGATCTCTGGAATCTGGACA |
| | | GGTGCTGCTGGAAAGCAACATCAAGGTGCTGCCCA |
| | | CCTGGTCTACCCCAGTTCAGCCTATGGCTCTGATT |
| | | GTGCTTGGCGGAGTTGCCGGCCTGCTGCTCTTTAT |
| | | CGGCCTGGGCATCTTCTTTTGCGTGCGGTGCAGAC |
| | | ATCGGCGGAGACAGGCTGAGAGAATGAGCCAGATC |
| | | AAGCGGCTGCTGAGCGAGAAGAAAACCTGTCAGTG |
| | | CCCTCACCGGTTCCAGAAAACATGCAGCCCCATC |
| 632 | Nucleotide | ATGGCTCTGCCTGTGACAGCTCTGTTGCTGCCTCT |
| | | GGCTCTGCTGCTGCATGCTGCTAGACCTAAGGTGC |
| | | AGCTGGTGGAGAGCGGCGGCGGCCTGGTGCAGGCC |
| | | GGCGGCAGCCTGAGGCTGAGCTGCGCCGCCAGCGG |
| | | CAGGACCGGCAGCAGCTACGCCATGGGCTGGTTCA |
| | | GGCAGGCCCCCGGCAAGGAGAGGGAGTTCGTGGCC |
| | | GCCATCACCTGGAGCGGCGGCATCACCGCCTACGC |
| | | CGACAGCGTGAAGGGCAGGTTCACCATCAGCAGGG |
| | | ACAACGCCAAGAACACCGTGTACCTGCAGATGAAC |
| | | AGCCTGAAGCCCGAGGACACCGCCGTGTACTGCTG |
| | | CGCCGCCGGCGTGACCGGCAGCCCCAGCTTCGACA |
| | | GCTGGGGCCAGGGCACCCAGGTGACCGTGAGCAGC |
| | | GAGCAGAAACTGATCAGCGAGGAAGATCTGAATCC |
| | | TGGCGGAGGCGGAGGAAGTGGTGGCGGAGGTTCTG |
| | | GTGGCGGTGGATCAGGCGGTGGCGGATCTGGATCT |
| | | ATGGATATCCAGATGACCCAGTCCCCGAGCTCCCT |
| | | GTCCGCCTCTGTGGGCGATAGGGTCACCATCACCT |
| | | GCCGTGCCAGTCAGGACATCCGTAATTATCTGAAC |
| | | TGGTATCAACAGAAACCAGGAAAAGCTCCGAAACT |
| | | ACTGATTTACTATACCTCCCGCCTGGAGTCTGGAG |
| | | TCCCTTCTCGCTTCTCTGGTTCTGGTTCTGGGACG |
| | | GATTACACTCTGACCATCAGCAGTCTGCAACCGGA |
| | | AGACTTCGCAACTTATTACTGTCAGCAAGGTAATA |
| | | CTCTGCCGTGGACGTTCGGACAGGGCACCAAGGTG |
| | | GAGATCAAAGGCGGCGGCGGAAGTGGAGGAGGAGG |
| | | CTCAGGCGGAGGAGGGAGCGAGGTTCAGCTGGTGG |
| | | AGTCTGGCGGTGGCCTGGTGCAGCCAGGGGGCTCA |
| | | CTCCGTTTGTCCTGTGCAGCTTCTGGCTACTCCTT |
| | | TACCGGCTACACTATGAACTGGGTGCGTCAGGCCC |
| | | CAGGTAAGGGCCTGGAATGGGTTGCACTGATTAAT |
| | | CCTACCAAAGGTGTTAGTACCTACAACCAGAAGTT |
| | | CAAGGACCGTTTCACTATAAGCGTAGATAAATCCA |
| | | AAAACACAGCCTACCTGCAAATGAACAGCCTGCGT |
| | | GCTGAGGACACTGCCGTCTATTATTGTGCTAGAAG |
| | | CGGATACTACGGCGATAGTGACTGGTATTTTGACG |
| | | TGTGGGGTCAAGGAACCCTGGTCACCGTCTCCTCG |
| | | ACATCTGGCGGCGGAGGATCTCTGGAATCTGGACA |
| | | GGTGCTGCTGGAAAGCAACATCAAGGTGCTGCCCA |
| | | CCTGGTCTACCCCAGTTCAGCCTATGGCTCTGATT |
| | | GTGCTTGGCGGAGTTGCCGGCCTGCTGCTCTTTAT |
| | | CGGCCTGGGCATCTTCTTTTGCGTGCGGTGCAGAC |
| | | ATCGGCGGAGACAGGCTGAGAGAATGAGCCAGATC |
| | | AAGCGGCTGCTGAGCGAGAAGAAAACCTGTCAGTG |
| | | CCCTCACCGGTTCCAGAAAACATGCAGCCCCATC |
| 633 | Nucleotide | ATGGCTCTGCCTGTGACAGCTCTGTTGCTGCCTCT |
| | | GGCTCTGCTGCTGCATGCTGCTAGACCTGAGGTGC |
| | | AGCTGGTGGAGAGCGGCGGCGGCCTGGTGCAGGCC |
| | | GGCGGCAGCCTGAGGCTGAGCTGCGCCGCCAGCGG |
| | | CAGGACCTTCAGCAGCTACGCCATGGGCTGGTTCA |
| | | GGCAGGCCCCCGGCAAGGAGAGGGAGTTCGTGGCC |
| | | GCCATCAGCGGCAGCGGCGGCGTGACCTTCTACGC |
| | | CCACAGCGTGAAGGGCAGGTTCACCATCAGCAGGG |
| | | ACAACGCCAAGAACACCGTGTACCTGCAGATGAAC |
| | | AGCCTGAAGCCCGAGGACACCGCCGTGTACAGCTG |
| | | CGCCGGCGGCGCCCACGGCAGCCCCGACTTCGGCA |
| | | GCTGGGGCCAGGGCACCCAGGTGACCGTGAGCAGC |
| | | GAGCAGAAACTGATCAGCGAGGAAGATCTGAATCC |
| | | TGGCGGAGGCGGAGGAAGTGGTGGCGGAGGTTCTG |
| | | GTGGCGGTGGATCAGGCGGTGGCGGATCTGGATCT |
| | | ATGGATATCCAGATGACCCAGTCCCCGAGCTCCCT |
| | | GTCCGCCTCTGTGGGCGATAGGGTCACCATCACCT |
| | | GCCGTGCCAGTCAGGACATCCGTAATTATCTGAAC |
| | | TGGTATCAACAGAAACCAGGAAAAGCTCCGAAACT |
| | | ACTGATTTACTATACCTCCCGCCTGGAGTCTGGAG |
| | | TCCCTTCTCGCTTCTCTGGTTCTGGTTCTGGGACG |
| | | GATTACACTCTGACCATCAGCAGTCTGCAACCGGA |
| | | AGACTTCGCAACTTATTACTGTCAGCAAGGTAATA |
| | | CTCTGCCGTGGACGTTCGGACAGGGCACCAAGGTG |
| | | GAGATCAAAGGCGGCGGCGGAAGTGGAGGAGGAGG |
| | | CTCAGGCGGAGGAGGGAGCGAGGTTCAGCTGGTGG |
| | | AGTCTGGCGGTGGCCTGGTGCAGCCAGGGGGCTCA |
| | | CTCCGTTTGTCCTGTGCAGCTTCTGGCTACTCCTT |
| | | TACCGGCTACACTATGAACTGGGTGCGTCAGGCCC |
| | | CAGGTAAGGGCCTGGAATGGGTTGCACTGATTAAT |
| | | CCTACCAAAGGTGTTAGTACCTACAACCAGAAGTT |
| | | CAAGGACCGTTTCACTATAAGCGTAGATAAATCCA |
| | | AAAACACAGCCTACCTGCAAATGAACAGCCTGCGT |
| | | GCTGAGGACACTGCCGTCTATTATTGTGCTAGAAG |
| | | CGGATACTACGGCGATAGTGACTGGTATTTTGACG |
| | | TGTGGGGTCAAGGAACCCTGGTCACCGTCTCCTCG |
| | | ACATCTGGCGGCGGAGGATCTCTGGAATCTGGACA |
| | | GGTGCTGCTGGAAAGCAACATCAAGGTGCTGCCCA |
| | | CCTGGTCTACCCCAGTTCAGCCTATGGCTCTGATT |
| | | GTGCTTGGCGGAGTTGCCGGCCTGCTGCTCTTTAT |
| | | CGGCCTGGGCATCTTCTTTTGCGTGCGGTGCAGAC |
| | | ATCGGCGGAGACAGGCTGAGAGAATGAGCCAGATC |
| | | AAGCGGCTGCTGAGCGAGAAGAAAACCTGTCAGTG |
| | | CCCTCACCGGTTCCAGAAAACATGCAGCCCCATC |
| 634 | Nucleotide | ATGGCTCTGCCTGTGACAGCTCTGTTGCTGCCTCT |
| | | GGCTCTGCTGCTGCATGCTGCTAGACCTCAGGTGC |
| | | AGCTGGTGGAGAGCGGCGGCGGCCTGGTGCAGCCC |
| | | GGCGGCAGCCTGAGGCTGAGCTGCGCCGTGAGCAG |
| | | GAACATCGCCAGCCTGTACAGGGTGGACTGGTACA |
| | | GGCAGGCCCCCGGCAAGCAGAGGGAGCTGGTGGCC |
| | | GGCAGGACCAGCGGCGGCACCACCACCTACCTGGA |
| | | CGCCGTGGAGGGCAGGTTCACCATCAGCAGGGACA |
| | | ACGTGAAGGACACCGTGTACCTGCAGATGAACAGC |
| | | CTGACCCCCGAGGACACCGCCGTGTACTACTGCCA |
| | | CGCCCACGACCACTGGAGGGACAGCTGGGGCCAGG |
| | | GCACCCAGGTGACCGTGAGCAGCGAGCAGAAACTG |
| | | ATCAGCGAGGAAGATCTGAATCCTGGCGGAGGCGG |
| | | AGGAAGTGGTGGCGGAGGTTCTGGTGGCGGTGGAT |
| | | CAGGCGGTGGCGGATCTGGATCTATGGATATCCAG |
| | | ATGACCCAGTCCCCGAGCTCCCTGTCCGCCTCTGT |
| | | GGGCGATAGGGTCACCATCACCTGCCGTGCCAGTC |
| | | AGGACATCCGTAATTATCTGAACTGGTATCAACAG |
| | | AAACCAGGAAAAGCTCCGAAACTACTGATTTACTA |
| | | TACCTCCCGCCTGGAGTCTGGAGTCCCTTCTCGCT |
| | | TCTCTGGTTCTGGTTCTGGGACGGATTACACTCTG |
| | | ACCATCAGCAGTCTGCAACCGGAAGACTTCGCAAC |
| | | TTATTACTGTCAGCAAGGTAATACTCTGCCGTGGA |
| | | CGTTCGGACAGGGCACCAAGGTGGAGATCAAAGGC |
| | | GGCGGCGGAAGTGGAGGAGGAGGCTCAGGCGGAGG |
| | | AGGGAGCGAGGTTCAGCTGGTGGAGTCTGGCGGTG |
| | | GCCTGGTGCAGCCAGGGGGCTCACTCCGTTTGTCC |
| | | TGTGCAGCTTCTGGCTACTCCTTTACCGGCTACAC |
| | | TATGAACTGGGTGCGTCAGGCCCCAGGTAAGGGCC |
| | | TGGAATGGGTTGCACTGATTAATCCTACCAAAGGT |
| | | GTTAGTACCTACAACCAGAAGTTCAAGGACCGTTT |
| | | CACTATAAGCGTAGATAAATCCAAAAACACAGCCT |
| | | ACCTGCAAATGAACAGCCTGCGTGCTGAGGACACT |
| | | GCCGTCTATTATTGTGCTAGAAGCGGATACTACGG |
| | | CGATAGTGACTGGTATTTTGACGTGTGGGGTCAAG |
| | | GAACCCTGGTCACCGTCTCCTCGACATCTGGCGGC |
| | | GGAGGATCTCTGGAATCTGGACAGGTGCTGCTGGA |
| | | AAGCAACATCAAGGTGCTGCCCACCTGGTCTACCC |
| | | CAGTTCAGCCTATGGCTCTGATTGTGCTTGGCGGA |
| | | GTTGCCGGCCTGCTGCTCTTTATCGGCCTGGGCAT |
| | | CTTCTTTTGCGTGCGGTGCAGACATCGGCGGAGAC |
| | | AGGCTGAGAGAATGAGCCAGATCAAGCGGCTGCTG |
| | | AGCGAGAAGAAAACCTGTCAGTGCCCTCACCGGTT |
| | | CCAGAAAACATGCAGCCCCATC |
| 635 | Nucleotide | ATGGCTCTGCCTGTGACAGCTCTGTTGCTGCCTCT |
| | | GGCTCTGCTGCTGCATGCTGCTAGACCTCAGGTGC |
| | | AGCTGGTGGAGAGCGGCGGCGACCTGGTGCAGCCC |
| | | GGCGGCAGCCTGAGGCTGAGCTGCGCCGCCAGCGG |
| | | CAGCATCGGCAGCATCTACGCCATGGGCTGGTACA |
| | | GGCAGGCCCCCGGCAGGCAGAGGGAGCTGGTGGCC |
| | | ACCACCACCAGCGGCGGCACCACCAACTACGCCGA |
| | | CAGCGTGAAGGGCAGGTTCACCATCGCCGGCGACA |
| | | ACGCCAAGAACACCGTGTTCCTGCAGATGAACAGC |
| | | CTGAGGCCCGAGGACACCGCCGTGTACTACTGCAA |
| | | GATCCAGACCCACTGGTACGTGTACTGGGGCCAGG |
| | | GCACCCAGGTGACCGTGAGCAGCGAGCAGAAACTG |
| | | ATCAGCGAGGAAGATCTGAATCCTGGCGGAGGCGG |
| | | AGGAAGTGGTGGCGGAGGTTCTGGTGGCGGTGGAT |
| | | CAGGCGGTGGCGGATCTGGATCTATGGATATCCAG |
| | | ATGACCCAGTCCCCGAGCTCCCTGTCCGCCTCTGT |
| | | GGGCGATAGGGTCACCATCACCTGCCGTGCCAGTC |
| | | AGGACATCCGTAATTATCTGAACTGGTATCAACAG |
| | | AAACCAGGAAAAGCTCCGAAACTACTGATTTACTA |
| | | TACCTCCCGCCTGGAGTCTGGAGTCCCTTCTCGCT |
| | | TCTCTGGTTCTGGTTCTGGGACGGATTACACTCTG |
| | | ACCATCAGCAGTCTGCAACCGGAAGACTTCGCAAC |
| | | TTATTACTGTCAGCAAGGTAATACTCTGCCGTGGA |
| | | CGTTCGGACAGGGCACCAAGGTGGAGATCAAAGGC |
| | | GGCGGCGGAAGTGGAGGAGGAGGCTCAGGCGGAGG |
| | | AGGGAGCGAGGTTCAGCTGGTGGAGTCTGGCGGTG |
| | | GCCTGGTGCAGCCAGGGGGCTCACTCCGTTTGTCC |
| | | TGTGCAGCTTCTGGCTACTCCTTTACCGGCTACAC |
| | | TATGAACTGGGTGCGTCAGGCCCCAGGTAAGGGCC |
| | | TGGAATGGGTTGCACTGATTAATCCTACCAAAGGT |
| | | GTTAGTACCTACAACCAGAAGTTCAAGGACCGTTT |
| | | CACTATAAGCGTAGATAAATCCAAAAACACAGCCT |
| | | ACCTGCAAATGAACAGCCTGCGTGCTGAGGACACT |
| | | GCCGTCTATTATTGTGCTAGAAGCGGATACTACGG |
| | | CGATAGTGACTGGTATTTTGACGTGTGGGGTCAAG |
| | | GAACCCTGGTCACCGTCTCCTCGACATCTGGCGGC |
| | | GGAGGATCTCTGGAATCTGGACAGGTGCTGCTGGA |
| | | AAGCAACATCAAGGTGCTGCCCACCTGGTCTACCC |
| | | CAGTTCAGCCTATGGCTCTGATTGTGCTTGGCGGA |
| | | GTTGCCGGCCTGCTGCTCTTTATCGGCCTGGGCAT |
| | | CTTCTTTTGCGTGCGGTGCAGACATCGGCGGAGAC |
| | | AGGCTGAGAGAATGAGCCAGATCAAGCGGCTGCTG |
| | | AGCGAGAAGAAAACCTGTCAGTGCCCTCACCGGTT |
| | | CCAGAAAACATGCAGCCCCATC |
| 636 | Nucleotide | ATGGCTCTGCCTGTGACAGCTCTGTTGCTGCCTCT |
| | | GGCTCTGCTGCTGCATGCTGCTAGACCTGAGGTGC |
| | | AGCTGGTGGAGAGCGGCGGCGGCCTGGTGCAGCCC |
| | | GGCGGCAGCCTGAGGCTGAGCTGCGCCGCCAGCAG |
| | | GAACATCTTCAGCCTGTACAGGGTGGACTGGTACA |
| | | GGCAGGCCCCCGGCAAGCAGAGGGAGCTGGTGGCC |
| | | GGCAGCACCAGCGGCGGCACCACCACCTACGCCGA |
| | | CGCCGTGAAGGGCAGGTTCACCATCAGCACCGACA |
| | | ACGTGAAGGACACCGTGTACCTGCAGATGAACAGC |
| | | CTGACCCCCGAGGACACCGCCGTGTACTACTGCCA |
| | | CGCCCACGACCACTGGAGGGACAGCTGGGGCCAGG |
| | | GCACCCAGGTGACCGTGAGCAGCGAGCAGAAACTG |
| | | ATCAGCGAGGAAGATCTGAATCCTGGCGGAGGCGG |
| | | AGGAAGTGGTGGCGGAGGTTCTGGTGGCGGTGGAT |
| | | CAGGCGGTGGCGGATCTGGATCTATGGATATCCAG |
| | | ATGACCCAGTCCCCGAGCTCCCTGTCCGCCTCTGT |
| | | GGGCGATAGGGTCACCATCACCTGCCGTGCCAGTC |
| | | AGGACATCCGTAATTATCTGAACTGGTATCAACAG |
| | | AAACCAGGAAAAGCTCCGAAACTACTGATTTACTA |
| | | TACCTCCCGCCTGGAGTCTGGAGTCCCTTCTCGCT |
| | | TCTCTGGTTCTGGTTCTGGGACGGATTACACTCTG |
| | | ACCATCAGCAGTCTGCAACCGGAAGACTTCGCAAC |
| | | TTATTACTGTCAGCAAGGTAATACTCTGCCGTGGA |
| | | CGTTCGGACAGGGCACCAAGGTGGAGATCAAAGGC |
| | | GGCGGCGGAAGTGGAGGAGGAGGCTCAGGCGGAGG |
| | | AGGGAGCGAGGTTCAGCTGGTGGAGTCTGGCGGTG |
| | | GCCTGGTGCAGCCAGGGGGCTCACTCCGTTTGTCC |
| | | TGTGCAGCTTCTGGCTACTCCTTTACCGGCTACAC |
| | | TATGAACTGGGTGCGTCAGGCCCCAGGTAAGGGCC |
| | | TGGAATGGGTTGCACTGATTAATCCTACCAAAGGT |
| | | GTTAGTACCTACAACCAGAAGTTCAAGGACCGTTT |
| | | CACTATAAGCGTAGATAAATCCAAAAACACAGCCT |
| | | ACCTGCAAATGAACAGCCTGCGTGCTGAGGACACT |
| | | GCCGTCTATTATTGTGCTAGAAGCGGATACTACGG |
| | | CGATAGTGACTGGTATTTTGACGTGTGGGGTCAAG |
| | | GAACCCTGGTCACCGTCTCCTCGACATCTGGCGGC |
| | | GGAGGATCTCTGGAATCTGGACAGGTGCTGCTGGA |
| | | AAGCAACATCAAGGTGCTGCCCACCTGGTCTACCC |
| | | CAGTTCAGCCTATGGCTCTGATTGTGCTTGGCGGA |
| | | GTTGCCGGCCTGCTGCTCTTTATCGGCCTGGGCAT |
| | | CTTCTTTTGCGTGCGGTGCAGACATCGGCGGAGAC |
| | | AGGCTGAGAGAATGAGCCAGATCAAGCGGCTGCTG |
| | | AGCGAGAAGAAAACCTGTCAGTGCCCTCACCGGTT |
| | | CCAGAAAACATGCAGCCCCATC |
| 637 | Nucleotide | ATGGCTCTGCCTGTGACAGCTCTGTTGCTGCCTCT |
| | | GGCTCTGCTGCTGCATGCTGCTAGACCTCAGGTGC |
| | | AGCTGGTGGAGAGCGGCGGCGGCTGGGTGCACCCC |
| | | GGCGGCAGCCTGAGGCTGAGCTGCGCCGCCAGCAG |
| | | GAACATCTTCAGCATGTACAGGGTGGACTGGTACA |
| | | GGCAGGCCCCCGGCAAGCAGAGGGAGCTGGTGGCC |
| | | GGCATCACCAGCGGCGGCACCACCAGCTACGCCGA |
| | | CGCCGTGAAGGGCAGGTTCACCATCAGCACCGACA |
| | | ACGTGAAGGACACCGTGTACCTGCAGATGAACAGC |
| | | GTGACCCCCGAGGACACCGCCGTGTACTACTGCCA |
| | | CGCCCACGACCACTGGAGGGACAGCTGGGGCCAGG |
| | | GCACCCAGGTGACCGTGAGCAGCGAGCAGAAACTG |
| | | ATCAGCGAGGAAGATCTGAATCCTGGCGGAGGCGG |
| | | AGGAAGTGGTGGCGGAGGTTCTGGTGGCGGTGGAT |
| | | CAGGCGGTGGCGGATCTGGATCTATGGATATCCAG |
| | | ATGACCCAGTCCCCGAGCTCCCTGTCCGCCTCTGT |
| | | GGGCGATAGGGTCACCATCACCTGCCGTGCCAGTC |
| | | AGGACATCCGTAATTATCTGAACTGGTATCAACAG |
| | | AAACCAGGAAAAGCTCCGAAACTACTGATTTACTA |
| | | TACCTCCCGCCTGGAGTCTGGAGTCCCTTCTCGCT |
| | | TCTCTGGTTCTGGTTCTGGGACGGATTACACTCTG |
| | | ACCATCAGCAGTCTGCAACCGGAAGACTTCGCAAC |
| | | TTATTACTGTCAGCAAGGTAATACTCTGCCGTGGA |
| | | CGTTCGGACAGGGCACCAAGGTGGAGATCAAAGGC |
| | | GGCGGCGGAAGTGGAGGAGGAGGCTCAGGCGGAGG |
| | | AGGGAGCGAGGTTCAGCTGGTGGAGTCTGGCGGTG |
| | | GCCTGGTGCAGCCAGGGGGCTCACTCCGTTTGTCC |
| | | TGTGCAGCTTCTGGCTACTCCTTTACCGGCTACAC |
| | | TATGAACTGGGTGCGTCAGGCCCCAGGTAAGGGCC |
| | | TGGAATGGGTTGCACTGATTAATCCTACCAAAGGT |
| | | GTTAGTACCTACAACCAGAAGTTCAAGGACCGTTT |
| | | CACTATAAGCGTAGATAAATCCAAAAACACAGCCT |
| | | ACCTGCAAATGAACAGCCTGCGTGCTGAGGACACT |
| | | GCCGTCTATTATTGTGCTAGAAGCGGATACTACGG |
| | | CGATAGTGACTGGTATTTTGACGTGTGGGGTCAAG |
| | | GAACCCTGGTCACCGTCTCCTCGACATCTGGCGGC |
| | | GGAGGATCTCTGGAATCTGGACAGGTGCTGCTGGA |
| | | AAGCAACATCAAGGTGCTGCCCACCTGGTCTACCC |
| | | CAGTTCAGCCTATGGCTCTGATTGTGCTTGGCGGA |
| | | GTTGCCGGCCTGCTGCTCTTTATCGGCCTGGGCAT |
| | | CTTCTTTTGCGTGCGGTGCAGACATCGGCGGAGAC |
| | | AGGCTGAGAGAATGAGCCAGATCAAGCGGCTGCTG |
| | | AGCGAGAAGAAAACCTGTCAGTGCCCTCACCGGTT |
| | | CCAGAAAACATGCAGCCCCATC |
| 638 | Nucleotide | ATGGCTCTGCCTGTGACAGCTCTGTTGCTGCCTCT |
| | | GGCTCTGCTGCTGCATGCTGCTAGACCTGAGGTGC |
| | | AGGTGCAGGAGAGCGGCGGCGACCTGGTGCAGCCC |
| | | GGCGGCAGCCTGAGGCTGAGCTGCGCCGCCAGCGG |
| | | CAGCATCGGCAGCATCTACAGGAAGGGCTGGTACA |
| | | GGCAGGCCCCCGGCAGCCAGAGGGAGCTGGTGGCC |
| | | ACCATCACCAGCGCCGGCACCACCAACTACGCCGA |
| | | CAGCGTGAAGGGCAGGTTCACCATCAGCAGGGACA |
| | | ACGCCAAGAACACCGTGTACCTGCAGATGAACAGC |
| | | CTGAGGCCCGAGGACACCGCCGTGTACTACTGCAA |
| | | CTTCCAGACCCACTGGTACGTGTACTGGGGCCAGG |
| | | GCACCCAGGTGACCGTGAGCAGCGAGCAGAAACTG |
| | | ATCAGCGAGGAAGATCTGAATCCTGGCGGAGGCGG |
| | | AGGAAGTGGTGGCGGAGGTTCTGGTGGCGGTGGAT |
| | | CAGGCGGTGGCGGATCTGGATCTATGGATATCCAG |
| | | ATGACCCAGTCCCCGAGCTCCCTGTCCGCCTCTGT |
| | | GGGCGATAGGGTCACCATCACCTGCCGTGCCAGTC |
| | | AGGACATCCGTAATTATCTGAACTGGTATCAACAG |
| | | AAACCAGGAAAAGCTCCGAAACTACTGATTTACTA |
| | | TACCTCCCGCCTGGAGTCTGGAGTCCCTTCTCGCT |
| | | TCTCTGGTTCTGGTTCTGGGACGGATTACACTCTG |
| | | ACCATCAGCAGTCTGCAACCGGAAGACTTCGCAAC |
| | | TTATTACTGTCAGCAAGGTAATACTCTGCCGTGGA |
| | | CGTTCGGACAGGGCACCAAGGTGGAGATCAAAGGC |
| | | GGCGGCGGAAGTGGAGGAGGAGGCTCAGGCGGAGG |
| | | AGGGAGCGAGGTTCAGCTGGTGGAGTCTGGCGGTG |
| | | GCCTGGTGCAGCCAGGGGGCTCACTCCGTTTGTCC |
| | | TGTGCAGCTTCTGGCTACTCCTTTACCGGCTACAC |
| | | TATGAACTGGGTGCGTCAGGCCCCAGGTAAGGGCC |
| | | TGGAATGGGTTGCACTGATTAATCCTACCAAAGGT |
| | | GTTAGTACCTACAACCAGAAGTTCAAGGACCGTTT |
| | | CACTATAAGCGTAGATAAATCCAAAAACACAGCCT |
| | | ACCTGCAAATGAACAGCCTGCGTGCTGAGGACACT |
| | | GCCGTCTATTATTGTGCTAGAAGCGGATACTACGG |
| | | CGATAGTGACTGGTATTTTGACGTGTGGGGTCAAG |
| | | GAACCCTGGTCACCGTCTCCTCGACATCTGGCGGC |
| | | GGAGGATCTCTGGAATCTGGACAGGTGCTGCTGGA |
| | | AAGCAACATCAAGGTGCTGCCCACCTGGTCTACCC |
| | | CAGTTCAGCCTATGGCTCTGATTGTGCTTGGCGGA |
| | | GTTGCCGGCCTGCTGCTCTTTATCGGCCTGGGCAT |
| | | CTTCTTTTGCGTGCGGTGCAGACATCGGCGGAGAC |
| | | AGGCTGAGAGAATGAGCCAGATCAAGCGGCTGCTG |
| | | AGCGAGAAGAAAACCTGTCAGTGCCCTCACCGGTT |
| | | CCAGAAAACATGCAGCCCCATC |
| 639 | Nucleotide | ATGGCTCTGCCTGTGACAGCTCTGTTGCTGCCTCT |
| | | GGCTCTGCTGCTGCATGCTGCTAGACCTGAGGTGA |
| | | GGCTGGTGGAGAGCGGCGGCGGCCTGGTGCAGCCC |
| | | GGCGGCAGCCTGAGGCTGAGCTGCGCCGTGAGCAA |
| | | GAACATCTTCAGCATCTACAGGGTGGACTGGTACC |
| | | ACCAGGCCCCCGGCAAGCAGAGGGAGCTGGTGGCC |
| | | GGCTGGACCAGCGGCGGCAGCACCAGCTACGCCGA |
| | | CGCCGTGAAGGGCAGGTTCACCATCAGCACCGACA |
| | | ACGTGAAGGACACCGTGTACCTGCAGATGAACAGC |
| | | CTGACCCCCGAGGACACCGCCGTGTACTACTGCCA |
| | | CGCCCACGACCACTGGAGGGACTACTGGGGCCAGG |
| | | GCACCCAGGTGACCGTGAGCAGCGAGCAGAAACTG |
| | | ATCAGCGAGGAAGATCTGAATCCTGGCGGAGGCGG |
| | | AGGAAGTGGTGGCGGAGGTTCTGGTGGCGGTGGAT |
| | | CAGGCGGTGGCGGATCTGGATCTATGGATATCCAG |
| | | ATGACCCAGTCCCCGAGCTCCCTGTCCGCCTCTGT |
| | | GGGCGATAGGGTCACCATCACCTGCCGTGCCAGTC |
| | | AGGACATCCGTAATTATCTGAACTGGTATCAACAG |
| | | AAACCAGGAAAAGCTCCGAAACTACTGATTTACTA |
| | | TACCTCCCGCCTGGAGTCTGGAGTCCCTTCTCGCT |
| | | TCTCTGGTTCTGGTTCTGGGACGGATTACACTCTG |
| | | ACCATCAGCAGTCTGCAACCGGAAGACTTCGCAAC |
| | | TTATTACTGTCAGCAAGGTAATACTCTGCCGTGGA |
| | | CGTTCGGACAGGGCACCAAGGTGGAGATCAAAGGC |
| | | GGCGGCGGAAGTGGAGGAGGAGGCTCAGGCGGAGG |
| | | AGGGAGCGAGGTTCAGCTGGTGGAGTCTGGCGGTG |
| | | GCCTGGTGCAGCCAGGGGGCTCACTCCGTTTGTCC |
| | | TGTGCAGCTTCTGGCTACTCCTTTACCGGCTACAC |
| | | TATGAACTGGGTGCGTCAGGCCCCAGGTAAGGGCC |
| | | TGGAATGGGTTGCACTGATTAATCCTACCAAAGGT |
| | | GTTAGTACCTACAACCAGAAGTTCAAGGACCGTTT |
| | | CACTATAAGCGTAGATAAATCCAAAAACACAGCCT |
| | | ACCTGCAAATGAACAGCCTGCGTGCTGAGGACACT |
| | | GCCGTCTATTATTGTGCTAGAAGCGGATACTACGG |
| | | CGATAGTGACTGGTATTTTGACGTGTGGGGTCAAG |
| | | GAACCCTGGTCACCGTCTCCTCGACATCTGGCGGC |
| | | GGAGGATCTCTGGAATCTGGACAGGTGCTGCTGGA |
| | | AAGCAACATCAAGGTGCTGCCCACCTGGTCTACCC |
| | | CAGTTCAGCCTATGGCTCTGATTGTGCTTGGCGGA |
| | | GTTGCCGGCCTGCTGCTCTTTATCGGCCTGGGCAT |
| | | CTTCTTTTGCGTGCGGTGCAGACATCGGCGGAGAC |
| | | AGGCTGAGAGAATGAGCCAGATCAAGCGGCTGCTG |
| | | AGCGAGAAGAAAACCTGTCAGTGCCCTCACCGGTT |
| | | CCAGAAAACATGCAGCCCCATC |
| 640 | Nucleotide | ATGGCTCTGCCTGTGACAGCTCTGTTGCTGCCTCT |
| | | GGCTCTGCTGCTGCATGCTGCTAGACCTCAGGTGC |
| | | AGCTGCAGGAGAGCGGCGGCGGCCTGGTGCAGCCC |
| | | GGCGGCAGCCTGAGGCTGAGCTGCGCCGCCAGCAG |
| | | GAGCATCTTCGGCATCGCCTTCATGGACTGGTACA |
| | | GGCAGGCCCCCGGCAAGCAGAGGGAGTTCGTGGCC |
| | | GGCATCAGCCACAGCGGCGCCACCAGCTACGCCGA |
| | | CAGCGTGAAGGGCAGGTTCACCGTGAGCAGGGACA |
| | | ACGCCAAGAACACCATGTACCTGCAGATGAACAAC |
| | | CTGCTGCCCGAGGACAGCGCCGTGTACTACTGCAA |
| | | GGCCGACACCGCCACCAACACCGACTGGGGCCAGG |
| | | GCACCCAGGTGACCGTGAGCAGCGAGCAGAAACTG |
| | | ATCAGCGAGGAAGATCTGAATCCTGGCGGAGGCGG |
| | | AGGAAGTGGTGGCGGAGGTTCTGGTGGCGGTGGAT |
| | | CAGGCGGTGGCGGATCTGGATCTATGGATATCCAG |
| | | ATGACCCAGTCCCCGAGCTCCCTGTCCGCCTCTGT |
| | | GGGCGATAGGGTCACCATCACCTGCCGTGCCAGTC |
| | | AGGACATCCGTAATTATCTGAACTGGTATCAACAG |
| | | AAACCAGGAAAAGCTCCGAAACTACTGATTTACTA |
| | | TACCTCCCGCCTGGAGTCTGGAGTCCCTTCTCGCT |
| | | TCTCTGGTTCTGGTTCTGGGACGGATTACACTCTG |
| | | ACCATCAGCAGTCTGCAACCGGAAGACTTCGCAAC |
| | | TTATTACTGTCAGCAAGGTAATACTCTGCCGTGGA |
| | | CGTTCGGACAGGGCACCAAGGTGGAGATCAAAGGC |
| | | GGCGGCGGAAGTGGAGGAGGAGGCTCAGGCGGAGG |
| | | AGGGAGCGAGGTTCAGCTGGTGGAGTCTGGCGGTG |
| | | GCCTGGTGCAGCCAGGGGGCTCACTCCGTTTGTCC |
| | | TGTGCAGCTTCTGGCTACTCCTTTACCGGCTACAC |
| | | TATGAACTGGGTGCGTCAGGCCCCAGGTAAGGGCC |
| | | TGGAATGGGTTGCACTGATTAATCCTACCAAAGGT |
| | | GTTAGTACCTACAACCAGAAGTTCAAGGACCGTTT |
| | | CACTATAAGCGTAGATAAATCCAAAAACACAGCCT |
| | | ACCTGCAAATGAACAGCCTGCGTGCTGAGGACACT |
| | | GCCGTCTATTATTGTGCTAGAAGCGGATACTACGG |
| | | CGATAGTGACTGGTATTTTGACGTGTGGGGTCAAG |
| | | GAACCCTGGTCACCGTCTCCTCGACATCTGGCGGC |
| | | GGAGGATCTCTGGAATCTGGACAGGTGCTGCTGGA |
| | | AAGCAACATCAAGGTGCTGCCCACCTGGTCTACCC |
| | | CAGTTCAGCCTATGGCTCTGATTGTGCTTGGCGGA |
| | | GTTGCCGGCCTGCTGCTCTTTATCGGCCTGGGCAT |
| | | CTTCTTTTGCGTGCGGTGCAGACATCGGCGGAGAC |
| | | AGGCTGAGAGAATGAGCCAGATCAAGCGGCTGCTG |
| | | AGCGAGAAGAAAACCTGTCAGTGCCCTCACCGGTT |
| | | CCAGAAAACATGCAGCCCCATC |
| 641 | Nucleotide | ATGGCTCTGCCTGTGACAGCTCTGTTGCTGCCTCT |
| | | GGCTCTGCTGCTGCATGCTGCTAGACCTCAGGTGC |
| | | AGCTGCAGGAGAGCGGCGGCGGCCTGGTGCAGCCC |
| | | GGCGGCAGCCTGAGGCTGAGCTGCGCCGCCAGCGG |
| | | CATCATCTTCAGCATCAACACCATGGCCTGGTACA |
| | | GGCAGGGCCCCGGCAAGCAGAGGGACCTGGTGGCC |
| | | CTGATCAGCAGCGGCGGCAACACCAGCTACGCCGA |
| | | CAGCGTGAACGGCAGGTTCACCATCAGCAGGGACA |
| | | ACGCCAAGAACACCGTGTACCTGCAGATGAACGGC |
| | | CTGAAGCCCGAGGACACCGCCGTGTACTACTGCAA |
| | | CAGCGCCGGCAGGAGCTACAGCGGCAGCTACGGCG |
| | | CCTACTGGGGCCAGGGCACCCAGGTGACCGTGAGC |
| | | AGCGAGCAGAAACTGATCAGCGAGGAAGATCTGAA |
| | | TCCTGGCGGAGGCGGAGGAAGTGGTGGCGGAGGTT |
| | | CTGGTGGCGGTGGATCAGGCGGTGGCGGATCTGGA |
| | | TCTATGGATATCCAGATGACCCAGTCCCCGAGCTC |
| | | CCTGTCCGCCTCTGTGGGCGATAGGGTCACCATCA |
| | | CCTGCCGTGCCAGTCAGGACATCCGTAATTATCTG |
| | | AACTGGTATCAACAGAAACCAGGAAAAGCTCCGAA |
| | | ACTACTGATTTACTATACCTCCCGCCTGGAGTCTG |
| | | GAGTCCCTTCTCGCTTCTCTGGTTCTGGTTCTGGG |
| | | ACGGATTACACTCTGACCATCAGCAGTCTGCAACC |
| | | GGAAGACTTCGCAACTTATTACTGTCAGCAAGGTA |
| | | ATACTCTGCCGTGGACGTTCGGACAGGGCACCAAG |
| | | GTGGAGATCAAAGGCGGCGGCGGAAGTGGAGGAGG |
| | | AGGCTCAGGCGGAGGAGGGAGCGAGGTTCAGCTGG |
| | | TGGAGTCTGGCGGTGGCCTGGTGCAGCCAGGGGGC |
| | | TCACTCCGTTTGTCCTGTGCAGCTTCTGGCTACTC |
| | | CTTTACCGGCTACACTATGAACTGGGTGCGTCAGG |
| | | CCCCAGGTAAGGGCCTGGAATGGGTTGCACTGATT |
| | | AATCCTACCAAAGGTGTTAGTACCTACAACCAGAA |
| | | GTTCAAGGACCGTTTCACTATAAGCGTAGATAAAT |
| | | CCAAAAACACAGCCTACCTGCAAATGAACAGCCTG |
| | | CGTGCTGAGGACACTGCCGTCTATTATTGTGCTAG |
| | | AAGCGGATACTACGGCGATAGTGACTGGTATTTTG |
| | | ACGTGTGGGGTCAAGGAACCCTGGTCACCGTCTCC |
| | | TCGACATCTGGCGGCGGAGGATCTCTGGAATCTGG |
| | | ACAGGTGCTGCTGGAAAGCAACATCAAGGTGCTGC |
| | | CCACCTGGTCTACCCCAGTTCAGCCTATGGCTCTG |
| | | ATTGTGCTTGGCGGAGTTGCCGGCCTGCTGCTCTT |
| | | TATCGGCCTGGGCATCTTCTTTTGCGTGCGGTGCA |
| | | GACATCGGCGGAGACAGGCTGAGAGAATGAGCCAG |
| | | ATCAAGCGGCTGCTGAGCGAGAAGAAAACCTGTCA |
| | | GTGCCCTCACCGGTTCCAGAAAACATGCAGCCCCA |
| | | TC |
| 642 | Nucleotide | ATGGCTCTGCCTGTGACAGCTCTGTTGCTGCCTCT |
| | | GGCTCTGCTGCTGCATGCTGCTAGACCTGAGGTGC |
| | | AGCTGGTGGAGAGCGGCGGCGGCCTGGTGCAGCCC |
| | | GGCGGCAGCCTGAGGCTGAGCTGCGCCGCCAGCAG |
| | | GAGCATCTTCGTGATCGCCTTCATGGACTGGTACA |
| | | GGCAGGCCCCCGGCAAGCAGAGGGAGTTCGTGGCC |
| | | GGCATCAGCAGCAGCGGCGCCACCAGCTACGCCAG |
| | | CAGCGTGAAGGGCAGGTTCACCGTGAGCAGGGACA |
| | | CCGCCAAGAACACCATGTACCTGCAGATGAACAAC |
| | | CTGCTGCCCGAGGACAGCGCCGTGTACTACTGCAA |
| | | GGCCGACACCGCCACCACCACCGACTGGGGCCAGG |
| | | GCACCCAGGTGACCGTGAGCAGCGAGCAGAAACTG |
| | | ATCAGCGAGGAAGATCTGAATCCTGGCGGAGGCGG |
| | | AGGAAGTGGTGGCGGAGGTTCTGGTGGCGGTGGAT |
| | | CAGGCGGTGGCGGATCTGGATCTATGGATATCCAG |
| | | ATGACCCAGTCCCCGAGCTCCCTGTCCGCCTCTGT |
| | | GGGCGATAGGGTCACCATCACCTGCCGTGCCAGTC |
| | | AGGACATCCGTAATTATCTGAACTGGTATCAACAG |
| | | AAACCAGGAAAAGCTCCGAAACTACTGATTTACTA |
| | | TACCTCCCGCCTGGAGTCTGGAGTCCCTTCTCGCT |
| | | TCTCTGGTTCTGGTTCTGGGACGGATTACACTCTG |
| | | ACCATCAGCAGTCTGCAACCGGAAGACTTCGCAAC |
| | | TTATTACTGTCAGCAAGGTAATACTCTGCCGTGGA |
| | | CGTTCGGACAGGGCACCAAGGTGGAGATCAAAGGC |
| | | GGCGGCGGAAGTGGAGGAGGAGGCTCAGGCGGAGG |
| | | AGGGAGCGAGGTTCAGCTGGTGGAGTCTGGCGGTG |
| | | GCCTGGTGCAGCCAGGGGGCTCACTCCGTTTGTCC |
| | | TGTGCAGCTTCTGGCTACTCCTTTACCGGCTACAC |
| | | TATGAACTGGGTGCGTCAGGCCCCAGGTAAGGGCC |
| | | TGGAATGGGTTGCACTGATTAATCCTACCAAAGGT |
| | | GTTAGTACCTACAACCAGAAGTTCAAGGACCGTTT |
| | | CACTATAAGCGTAGATAAATCCAAAAACACAGCCT |
| | | ACCTGCAAATGAACAGCCTGCGTGCTGAGGACACT |
| | | GCCGTCTATTATTGTGCTAGAAGCGGATACTACGG |
| | | CGATAGTGACTGGTATTTTGACGTGTGGGGTCAAG |
| | | GAACCCTGGTCACCGTCTCCTCGACATCTGGCGGC |
| | | GGAGGATCTCTGGAATCTGGACAGGTGCTGCTGGA |
| | | AAGCAACATCAAGGTGCTGCCCACCTGGTCTACCC |
| | | CAGTTCAGCCTATGGCTCTGATTGTGCTTGGCGGA |
| | | GTTGCCGGCCTGCTGCTCTTTATCGGCCTGGGCAT |
| | | CTTCTTTTGCGTGCGGTGCAGACATCGGCGGAGAC |
| | | AGGCTGAGAGAATGAGCCAGATCAAGCGGCTGCTG |
| | | AGCGAGAAGAAAACCTGTCAGTGCCCTCACCGGTT |
| | | CCAGAAAACATGCAGCCCCATC |
| 643 | Nucleotide | ATGGCTCTGCCTGTGACAGCTCTGTTGCTGCCTCT |
| | | GGCTCTGCTGCTGCATGCTGCTAGACCTGAGGTGC |
| | | AGCTGGTGGAGAGCGGCGGCGGCCTGGTGCAGCCC |
| | | GGCGGCAGCCTGAGGCTGAGCTGCGCCGCCAGCGG |
| | | CATCATCTTCAGCATCAACACCATGGCCTGGTACA |
| | | GGCAGGGCCCCGGCAAGGAGAGGGACCTGGTGGCC |
| | | GTGATCAAGGGCGACGGCAGCACCAGCTACGCCGA |
| | | CAGCGTGAACGGCAGGTTCACCATCAGCAGGGACA |
| | | ACGCCAAGAACACCGTGTACCTGAGGATGAACGGC |
| | | CTGAAGCCCGAGGACACCGCCGTGTACTACTGCAA |
| | | CAGCGCCGGCAGGAGCTACAGCGGCGTGTACGGCG |
| | | CCTACTGGGGCCAGGGCACCCAGGTGACCGTGAGC |
| | | AGCGAGCAGAAACTGATCAGCGAGGAAGATCTGAA |
| | | TCCTGGCGGAGGCGGAGGAAGTGGTGGCGGAGGTT |
| | | CTGGTGGCGGTGGATCAGGCGGTGGCGGATCTGGA |
| | | TCTATGGATATCCAGATGACCCAGTCCCCGAGCTC |
| | | CCTGTCCGCCTCTGTGGGCGATAGGGTCACCATCA |
| | | CCTGCCGTGCCAGTCAGGACATCCGTAATTATCTG |
| | | AACTGGTATCAACAGAAACCAGGAAAAGCTCCGAA |
| | | ACTACTGATTTACTATACCTCCCGCCTGGAGTCTG |
| | | GAGTCCCTTCTCGCTTCTCTGGTTCTGGTTCTGGG |
| | | ACGGATTACACTCTGACCATCAGCAGTCTGCAACC |
| | | GGAAGACTTCGCAACTTATTACTGTCAGCAAGGTA |
| | | ATACTCTGCCGTGGACGTTCGGACAGGGCACCAAG |
| | | GTGGAGATCAAAGGCGGCGGCGGAAGTGGAGGAGG |
| | | AGGCTCAGGCGGAGGAGGGAGCGAGGTTCAGCTGG |
| | | TGGAGTCTGGCGGTGGCCTGGTGCAGCCAGGGGGC |
| | | TCACTCCGTTTGTCCTGTGCAGCTTCTGGCTACTC |
| | | CTTTACCGGCTACACTATGAACTGGGTGCGTCAGG |
| | | CCCCAGGTAAGGGCCTGGAATGGGTTGCACTGATT |
| | | AATCCTACCAAAGGTGTTAGTACCTACAACCAGAA |
| | | GTTCAAGGACCGTTTCACTATAAGCGTAGATAAAT |
| | | CCAAAAACACAGCCTACCTGCAAATGAACAGCCTG |
| | | CGTGCTGAGGACACTGCCGTCTATTATTGTGCTAG |
| | | AAGCGGATACTACGGCGATAGTGACTGGTATTTTG |
| | | ACGTGTGGGGTCAAGGAACCCTGGTCACCGTCTCC |
| | | TCGACATCTGGCGGCGGAGGATCTCTGGAATCTGG |
| | | ACAGGTGCTGCTGGAAAGCAACATCAAGGTGCTGC |
| | | CCACCTGGTCTACCCCAGTTCAGCCTATGGCTCTG |
| | | ATTGTGCTTGGCGGAGTTGCCGGCCTGCTGCTCTT |
| | | TATCGGCCTGGGCATCTTCTTTTGCGTGCGGTGCA |
| | | GACATCGGCGGAGACAGGCTGAGAGAATGAGCCAG |
| | | ATCAAGCGGCTGCTGAGCGAGAAGAAAACCTGTCA |
| | | GTGCCCTCACCGGTTCCAGAAAACATGCAGCCCCA |
| | | TC |
| 644 | Nucleotide | ATGGCTCTGCCTGTGACAGCTCTGTTGCTGCCTCT |
| | | GGCTCTGCTGCTGCATGCTGCTAGACCTGAGGTGC |
| | | AGCTGCAGGAGAGCGGCGGCGGCCTGGTGCAGCCC |
| | | GGCGGCAGCCTGAAGCTGAGCTGCGCCGCCAGCGG |
| | | CAGCATCTTCAGCATCGGCGCCATGAGGTGGTACA |
| | | GGCAGGTGCCCGGCAACGAGAGGGAGCTGGTGGCC |
| | | GGCATCACCAACGGCGGCAACACCAACTACGCCGA |
| | | CAGCGTGAAGGCCAGGTTCACCATCAGCAGGGACA |
| | | ACGCCAAGAACACCGTGTACCTGCAGATGAACAGC |
| | | CTGAAGCCCGAGGACACCACCGTGTACTTCTGCAA |
| | | CGCCGACGTGCAGAACAGCGGCTACGTGTGGGGCA |
| | | ACTACTGGGGCCAGGGCACCCAGGTGACCGTGAGC |
| | | AGCGAGCAGAAACTGATCAGCGAGGAAGATCTGAA |
| | | TCCTGGCGGAGGCGGAGGAAGTGGTGGCGGAGGTT |
| | | CTGGTGGCGGTGGATCAGGCGGTGGCGGATCTGGA |
| | | TCTATGGATATCCAGATGACCCAGTCCCCGAGCTC |
| | | CCTGTCCGCCTCTGTGGGCGATAGGGTCACCATCA |
| | | CCTGCCGTGCCAGTCAGGACATCCGTAATTATCTG |
| | | AACTGGTATCAACAGAAACCAGGAAAAGCTCCGAA |
| | | ACTACTGATTTACTATACCTCCCGCCTGGAGTCTG |
| | | GAGTCCCTTCTCGCTTCTCTGGTTCTGGTTCTGGG |
| | | ACGGATTACACTCTGACCATCAGCAGTCTGCAACC |
| | | GGAAGACTTCGCAACTTATTACTGTCAGCAAGGTA |
| | | ATACTCTGCCGTGGACGTTCGGACAGGGCACCAAG |
| | | GTGGAGATCAAAGGCGGCGGCGGAAGTGGAGGAGG |
| | | AGGCTCAGGCGGAGGAGGGAGCGAGGTTCAGCTGG |
| | | TGGAGTCTGGCGGTGGCCTGGTGCAGCCAGGGGGC |
| | | TCACTCCGTTTGTCCTGTGCAGCTTCTGGCTACTC |
| | | CTTTACCGGCTACACTATGAACTGGGTGCGTCAGG |
| | | CCCCAGGTAAGGGCCTGGAATGGGTTGCACTGATT |
| | | AATCCTACCAAAGGTGTTAGTACCTACAACCAGAA |
| | | GTTCAAGGACCGTTTCACTATAAGCGTAGATAAAT |
| | | CCAAAAACACAGCCTACCTGCAAATGAACAGCCTG |
| | | CGTGCTGAGGACACTGCCGTCTATTATTGTGCTAG |
| | | AAGCGGATACTACGGCGATAGTGACTGGTATTTTG |
| | | ACGTGTGGGGTCAAGGAACCCTGGTCACCGTCTCC |
| | | TCGACATCTGGCGGCGGAGGATCTCTGGAATCTGG |
| | | ACAGGTGCTGCTGGAAAGCAACATCAAGGTGCTGC |
| | | CCACCTGGTCTACCCCAGTTCAGCCTATGGCTCTG |
| | | ATTGTGCTTGGCGGAGTTGCCGGCCTGCTGCTCTT |
| | | TATCGGCCTGGGCATCTTCTTTTGCGTGCGGTGCA |
| | | GACATCGGCGGAGACAGGCTGAGAGAATGAGCCAG |
| | | ATCAAGCGGCTGCTGAGCGAGAAGAAAACCTGTCA |
| | | GTGCCCTCACCGGTTCCAGAAAACATGCAGCCCCA |
| | | TC |
| 645 | Nucleotide | ATGGCTCTGCCTGTGACAGCTCTGTTGCTGCCTCT |
| | | GGCTCTGCTGCTGCATGCTGCTAGACCTGAGGTGC |
| | | AGCTGGTGGAGAGCGGCGGCGGCCTGGTGCAGCCC |
| | | GGCGGCAGCCTGAGGCTGAGCTGCGCCGCCAGCAG |
| | | GAGCATCTTCGTGATCGCCTTCATGGACTGGTACA |
| | | GGCAGGCCCCCGGCAAGCAGAGGGAGTTCGTGGCC |
| | | GGCATCAGCAGCAGCGGCGCCACCAGCTACGCCGA |
| | | CAGCGTGAAGGGCAGGTTCACCGTGAGCAGGGACA |
| | | CCGCCAAGAACACCATGTACCTGCAGATGAACAAC |
| | | CTGCTGCCCGAGGACAGCGCCGTGTACTACTGCAA |
| | | GGCCGACACCGCCACCAACACCGACTGGGGCCAGG |
| | | GCACCCAGGTGACCGTGAGCAGCGAGCAGAAACTG |
| | | ATCAGCGAGGAAGATCTGAATCCTGGCGGAGGCGG |
| | | AGGAAGTGGTGGCGGAGGTTCTGGTGGCGGTGGAT |
| | | CAGGCGGTGGCGGATCTGGATCTATGGATATCCAG |
| | | ATGACCCAGTCCCCGAGCTCCCTGTCCGCCTCTGT |
| | | GGGCGATAGGGTCACCATCACCTGCCGTGCCAGTC |
| | | AGGACATCCGTAATTATCTGAACTGGTATCAACAG |
| | | AAACCAGGAAAAGCTCCGAAACTACTGATTTACTA |
| | | TACCTCCCGCCTGGAGTCTGGAGTCCCTTCTCGCT |
| | | TCTCTGGTTCTGGTTCTGGGACGGATTACACTCTG |
| | | ACCATCAGCAGTCTGCAACCGGAAGACTTCGCAAC |
| | | TTATTACTGTCAGCAAGGTAATACTCTGCCGTGGA |
| | | CGTTCGGACAGGGCACCAAGGTGGAGATCAAAGGC |
| | | GGCGGCGGAAGTGGAGGAGGAGGCTCAGGCGGAGG |
| | | AGGGAGCGAGGTTCAGCTGGTGGAGTCTGGCGGTG |
| | | GCCTGGTGCAGCCAGGGGGCTCACTCCGTTTGTCC |
| | | TGTGCAGCTTCTGGCTACTCCTTTACCGGCTACAC |
| | | TATGAACTGGGTGCGTCAGGCCCCAGGTAAGGGCC |
| | | TGGAATGGGTTGCACTGATTAATCCTACCAAAGGT |
| | | GTTAGTACCTACAACCAGAAGTTCAAGGACCGTTT |
| | | CACTATAAGCGTAGATAAATCCAAAAACACAGCCT |
| | | ACCTGCAAATGAACAGCCTGCGTGCTGAGGACACT |
| | | GCCGTCTATTATTGTGCTAGAAGCGGATACTACGG |
| | | CGATAGTGACTGGTATTTTGACGTGTGGGGTCAAG |
| | | GAACCCTGGTCACCGTCTCCTCGACATCTGGCGGC |
| | | GGAGGATCTCTGGAATCTGGACAGGTGCTGCTGGA |
| | | AAGCAACATCAAGGTGCTGCCCACCTGGTCTACCC |
| | | CAGTTCAGCCTATGGCTCTGATTGTGCTTGGCGGA |
| | | GTTGCCGGCCTGCTGCTCTTTATCGGCCTGGGCAT |
| | | CTTCTTTTGCGTGCGGTGCAGACATCGGCGGAGAC |
| | | AGGCTGAGAGAATGAGCCAGATCAAGCGGCTGCTG |
| | | AGCGAGAAGAAAACCTGTCAGTGCCCTCACCGGTT |
| | | CCAGAAAACATGCAGCCCCATC |
| 646 | Nucleotide | ATGGCTCTGCCTGTGACAGCTCTGTTGCTGCCTCT |
| | | GGCTCTGCTGCTGCATGCTGCTAGACCTCAGGTGC |
| | | AGCTGGTGGAGAGCGGCGGCGGCCTGGTGCAGCCC |
| | | GGCGGCAGCCTGAGGCTGAGCTGCGCCACCAGCGG |
| | | CATCATCTTCCACATCTACACCATGGGCTGGTACA |
| | | GGGGCGCCCCCGGCAAGCAGAGGGAGCTGGTGGCC |
| | | AGGATCACCAGCGGCGGCGACACCAACTACGCCGA |
| | | CAGCGTGAAGGGCAGGTTCACCATCAGCAGGGACA |
| | | ACGTGAAGAACACCATGTACCTGCAGATGAACAGC |
| | | CTGAAGCCCGAGGACACCGCCGTGTACTACTGCAA |
| | | CAGGTTCCCCGGCGCCACCTTCAGCTGGGGCCAGG |
| | | GCACCCAGGTGACCGTGAGCAGCGAGCAGAAACTG |
| | | ATCAGCGAGGAAGATCTGAATCCTGGCGGAGGCGG |
| | | AGGAAGTGGTGGCGGAGGTTCTGGTGGCGGTGGAT |
| | | CAGGCGGTGGCGGATCTGGATCTATGGATATCCAG |
| | | ATGACCCAGTCCCCGAGCTCCCTGTCCGCCTCTGT |
| | | GGGCGATAGGGTCACCATCACCTGCCGTGCCAGTC |
| | | AGGACATCCGTAATTATCTGAACTGGTATCAACAG |
| | | AAACCAGGAAAAGCTCCGAAACTACTGATTTACTA |
| | | TACCTCCCGCCTGGAGTCTGGAGTCCCTTCTCGCT |
| | | TCTCTGGTTCTGGTTCTGGGACGGATTACACTCTG |
| | | ACCATCAGCAGTCTGCAACCGGAAGACTTCGCAAC |
| | | TTATTACTGTCAGCAAGGTAATACTCTGCCGTGGA |
| | | CGTTCGGACAGGGCACCAAGGTGGAGATCAAAGGC |
| | | GGCGGCGGAAGTGGAGGAGGAGGCTCAGGCGGAGG |
| | | AGGGAGCGAGGTTCAGCTGGTGGAGTCTGGCGGTG |
| | | GCCTGGTGCAGCCAGGGGGCTCACTCCGTTTGTCC |
| | | TGTGCAGCTTCTGGCTACTCCTTTACCGGCTACAC |
| | | TATGAACTGGGTGCGTCAGGCCCCAGGTAAGGGCC |
| | | TGGAATGGGTTGCACTGATTAATCCTACCAAAGGT |
| | | GTTAGTACCTACAACCAGAAGTTCAAGGACCGTTT |
| | | CACTATAAGCGTAGATAAATCCAAAAACACAGCCT |
| | | ACCTGCAAATGAACAGCCTGCGTGCTGAGGACACT |
| | | GCCGTCTATTATTGTGCTAGAAGCGGATACTACGG |
| | | CGATAGTGACTGGTATTTTGACGTGTGGGGTCAAG |
| | | GAACCCTGGTCACCGTCTCCTCGACATCTGGCGGC |
| | | GGAGGATCTCTGGAATCTGGACAGGTGCTGCTGGA |
| | | AAGCAACATCAAGGTGCTGCCCACCTGGTCTACCC |
| | | CAGTTCAGCCTATGGCTCTGATTGTGCTTGGCGGA |
| | | GTTGCCGGCCTGCTGCTCTTTATCGGCCTGGGCAT |
| | | CTTCTTTTGCGTGCGGTGCAGACATCGGCGGAGAC |
| | | AGGCTGAGAGAATGAGCCAGATCAAGCGGCTGCTG |
| | | AGCGAGAAGAAAACCTGTCAGTGCCCTCACCGGTT |
| | | CCAGAAAACATGCAGCCCCATC |
| 647 | Nucleotide | ATGGCTCTGCCTGTGACAGCTCTGTTGCTGCCTCT |
| | | GGCTCTGCTGCTGCATGCTGCTAGACCTCAGCTGC |
| | | AGCTGGTGGAGAGCGGCGGCGGCCTGGTGCAGGCC |
| | | GGCGGCAGCCTGAGGCTGAGCTGCGCCGTGAGCGG |
| | | CAACATCTGGGTGTTCACCGTGATGGCCTGGTACA |
| | | GGCAGGTGCCCGGCAAGCAGAGGGAGCTGGTGGCC |
| | | GCCAGCACCAACGGCGGCAGCACCAACTACGCCGA |
| | | CAGCGTGAAGGGCAGGTTCACCATCAGCAGGGACA |
| | | ACGTGAAGAACACCGTGTACCTGCAGATGAACAGC |
| | | CTGAAGCCCGAGGACACCGCCGTGTACTACTGCAA |
| | | CAGGCAGAGGACCGTGATCGGCATGAACCCCCTGG |
| | | CCCCCTGGGGCCAGGGCACCCAGGTGACCGTGAGC |
| | | AGCGAGCAGAAACTGATCAGCGAGGAAGATCTGAA |
| | | TCCTGGCGGAGGCGGAGGAAGTGGTGGCGGAGGTT |
| | | CTGGTGGCGGTGGATCAGGCGGTGGCGGATCTGGA |
| | | TCTATGGATATCCAGATGACCCAGTCCCCGAGCTC |
| | | CCTGTCCGCCTCTGTGGGCGATAGGGTCACCATCA |
| | | CCTGCCGTGCCAGTCAGGACATCCGTAATTATCTG |
| | | AACTGGTATCAACAGAAACCAGGAAAAGCTCCGAA |
| | | ACTACTGATTTACTATACCTCCCGCCTGGAGTCTG |
| | | GAGTCCCTTCTCGCTTCTCTGGTTCTGGTTCTGGG |
| | | ACGGATTACACTCTGACCATCAGCAGTCTGCAACC |
| | | GGAAGACTTCGCAACTTATTACTGTCAGCAAGGTA |
| | | ATACTCTGCCGTGGACGTTCGGACAGGGCACCAAG |
| | | GTGGAGATCAAAGGCGGCGGCGGAAGTGGAGGAGG |
| | | AGGCTCAGGCGGAGGAGGGAGCGAGGTTCAGCTGG |
| | | TGGAGTCTGGCGGTGGCCTGGTGCAGCCAGGGGGC |
| | | TCACTCCGTTTGTCCTGTGCAGCTTCTGGCTACTC |
| | | CTTTACCGGCTACACTATGAACTGGGTGCGTCAGG |
| | | CCCCAGGTAAGGGCCTGGAATGGGTTGCACTGATT |
| | | AATCCTACCAAAGGTGTTAGTACCTACAACCAGAA |
| | | GTTCAAGGACCGTTTCACTATAAGCGTAGATAAAT |
| | | CCAAAAACACAGCCTACCTGCAAATGAACAGCCTG |
| | | CGTGCTGAGGACACTGCCGTCTATTATTGTGCTAG |
| | | AAGCGGATACTACGGCGATAGTGACTGGTATTTTG |
| | | ACGTGTGGGGTCAAGGAACCCTGGTCACCGTCTCC |
| | | TCGACATCTGGCGGCGGAGGATCTCTGGAATCTGG |
| | | ACAGGTGCTGCTGGAAAGCAACATCAAGGTGCTGC |
| | | CCACCTGGTCTACCCCAGTTCAGCCTATGGCTCTG |
| | | ATTGTGCTTGGCGGAGTTGCCGGCCTGCTGCTCTT |
| | | TATCGGCCTGGGCATCTTCTTTTGCGTGCGGTGCA |
| | | GACATCGGCGGAGACAGGCTGAGAGAATGAGCCAG |
| | | ATCAAGCGGCTGCTGAGCGAGAAGAAAACCTGTCA |
| | | GTGCCCTCACCGGTTCCAGAAAACATGCAGCCCCA |
| | | TC |
| 648 | Nucleotide | ATGGCTCTGCCTGTGACAGCTCTGTTGCTGCCTCT |
| | | GGCTCTGCTGCTGCATGCTGCTAGACCTGAGGTGA |
| | | AGCTGGTGGAGAGCGGCGGCGGCCTGGTGCAGCCC |
| | | GGCGGCAGCCTGAAGCTGAGCTGCGCCGCCAGCGG |
| | | CTTCACCTTCAGCAGCTACGGCCTGAGCTGGGTGA |
| | | GGCAGACCCCCGACAAGGGCCTGGAGCTGGTGGCC |
| | | AGCATCAACAGGAACGGCGGCAACACCTACTACAC |
| | | CGACAGCGTGAAGGGCAGGTTCACCATCAGCAGGG |
| | | ACAACGCCAAGAACACCCTGAACCTGCAGATGAGC |
| | | AGCCTGAAGAGCGAGGACACCGCCATGTACTACTG |
| | | CGCCAGGGGCGGCTTCACCTACTGGGGCCAGGGCA |
| | | CCCTGGTGACCGTGAGCGCCGGCAGCACCAGCGGC |
| | | AGCGGCAAGCCCGGCAGCGGCGAGGGCAGCACCAA |
| | | GGGCCAGATCGTGCTGACCCAGAGCCCCGCCATCA |
| | | TGAGCGCCTTCCCCGGCGAGAAGGTGACCATGACC |
| | | TGCAGCGCCAGCAGCAGCGTGGGCTACATGTACTG |
| | | GTACCAGCAGAAGCCCGGCAGCAGCCCCAGGCTGC |
| | | TGATCTACGACACCAGCAACCTGGCCAGCGGCGTG |
| | | CCCGTGAGGTTCAGCGGCAGCGGCAGCGGCACCGC |
| | | CTACAGCCTGACCATCAGCAGGATGGAGGCCGAGG |
| | | ACGCCGCCACCTACTACTGCCAGCAGTGGAGCGGC |
| | | TACCCCCCCATCACCTTCGGCGCCGGCACCAAGCT |
| | | GGAGCTGAAGGAGCAGAAACTGATCAGCGAGGAAG |
| | | ATCTGAATCCTGGCGGAGGCGGAGGAAGTGGTGGC |
| | | GGAGGTTCTGGTGGCGGTGGATCAGGCGGTGGCGG |
| | | ATCTGGATCTATGGATATCCAGATGACCCAGTCCC |
| | | CGAGCTCCCTGTCCGCCTCTGTGGGCGATAGGGTC |
| | | ACCATCACCTGCCGTGCCAGTCAGGACATCCGTAA |
| | | TTATCTGAACTGGTATCAACAGAAACCAGGAAAAG |
| | | CTCCGAAACTACTGATTTACTATACCTCCCGCCTG |
| | | GAGTCTGGAGTCCCTTCTCGCTTCTCTGGTTCTGG |
| | | TTCTGGGACGGATTACACTCTGACCATCAGCAGTC |
| | | TGCAACCGGAAGACTTCGCAACTTATTACTGTCAG |
| | | CAAGGTAATACTCTGCCGTGGACGTTCGGACAGGG |
| | | CACCAAGGTGGAGATCAAAGGCGGCGGCGGAAGTG |
| | | GAGGAGGAGGCTCAGGCGGAGGAGGGAGCGAGGTT |
| | | CAGCTGGTGGAGTCTGGCGGTGGCCTGGTGCAGCC |
| | | AGGGGGCTCACTCCGTTTGTCCTGTGCAGCTTCTG |
| | | GCTACTCCTTTACCGGCTACACTATGAACTGGGTG |
| | | CGTCAGGCCCCAGGTAAGGGCCTGGAATGGGTTGC |
| | | ACTGATTAATCCTTATAAAGGTGTTAGTACCTACA |
| | | ACCAGAAGTTCAAGGACCGTTTCACTATAAGCGTA |
| | | GATAAATCCAAAAACACAGCCTACCTGCAAATGAA |
| | | CAGCCTGCGTGCTGAGGACACTGCCGTCTATTATT |
| | | GTGCTAGAAGCGGATACTACGGCGATAGTGACTGG |
| | | TATTTTGACGTGTGGGGTCAAGGAACCCTGGTCAC |
| | | CGTCTCCTCGACATCTGGCGGCGGAGGATCTCTGG |
| | | AATCTGGACAGGTGCTGCTGGAAAGCAACATCAAG |
| | | GTGCTGCCCACCTGGTCTACCCCAGTTCAGCCTAT |
| | | GGCTCTGATTGTGCTTGGCGGAGTTGCCGGCCTGC |
| | | TGCTCTTTATCGGCCTGGGCATCTTCTTTTGCGTG |
| | | CGGTGCAGACATCGGCGGAGACAGGCTGAGAGAAT |
| | | GAGCCAGATCAAGCGGCTGCTGAGCGAGAAGAAAA |
| | | CCTGTCAGTGCCCTCACCGGTTCCAGAAAACATGC |
| | | AGCCCCATC |
| 649 | Nucleotide | ATGGCTCTGCCTGTGACAGCTCTGTTGCTGCCTCT |
| | | GGCTCTGCTGCTGCATGCTGCTAGACCTCAGATCG |
| | | TGCTGACCCAGAGCCCCGCCATCATGAGCGCCTTC |
| | | CCCGGCGAGAAGGTGACCATGACCTGCAGCGCCAG |
| | | CAGCAGCGTGGGCTACATGTACTGGTACCAGCAGA |
| | | AGCCCGGCAGCAGCCCCAGGCTGCTGATCTACGAC |
| | | ACCAGCAACCTGGCCAGCGGCGTGCCCGTGAGGTT |
| | | CAGCGGCAGCGGCAGCGGCACCGCCTACAGCCTGA |
| | | CCATCAGCAGGATGGAGGCCGAGGACGCCGCCACC |
| | | TACTACTGCCAGCAGTGGAGCGGCTACCCCCCCAT |
| | | CACCTTCGGCGCCGGCACCAAGCTGGAGCTGAAGG |
| | | GCAGCACCAGCGGCAGCGGCAAGCCCGGCAGCGGC |
| | | GAGGGCAGCACCAAGGGCGAGGTGAAGCTGGTGGA |
| | | GAGCGGCGGCGGCCTGGTGCAGCCCGGCGGCAGCC |
| | | TGAAGCTGAGCTGCGCCGCCAGCGGCTTCACCTTC |
| | | AGCAGCTACGGCCTGAGCTGGGTGAGGCAGACCCC |
| | | CGACAAGGGCCTGGAGCTGGTGGCCAGCATCAACA |
| | | GGAACGGCGGCAACACCTACTACACCGACAGCGTG |
| | | AAGGGCAGGTTCACCATCAGCAGGGACAACGCCAA |
| | | GAACACCCTGAACCTGCAGATGAGCAGCCTGAAGA |
| | | GCGAGGACACCGCCATGTACTACTGCGCCAGGGGC |
| | | GGCTTCACCTACTGGGGCCAGGGCACCCTGGTGAC |
| | | CGTGAGCGCCGAGCAGAAACTGATCAGCGAGGAAG |
| | | ATCTGAATCCTGGCGGAGGCGGAGGAAGTGGTGGC |
| | | GGAGGTTCTGGTGGCGGTGGATCAGGCGGTGGCGG |
| | | ATCTGGATCTATGGATATCCAGATGACCCAGTCCC |
| | | CGAGCTCCCTGTCCGCCTCTGTGGGCGATAGGGTC |
| | | ACCATCACCTGCCGTGCCAGTCAGGACATCCGTAA |
| | | TTATCTGAACTGGTATCAACAGAAACCAGGAAAAG |
| | | CTCCGAAACTACTGATTTACTATACCTCCCGCCTG |
| | | GAGTCTGGAGTCCCTTCTCGCTTCTCTGGTTCTGG |
| | | TTCTGGGACGGATTACACTCTGACCATCAGCAGTC |
| | | TGCAACCGGAAGACTTCGCAACTTATTACTGTCAG |
| | | CAAGGTAATACTCTGCCGTGGACGTTCGGACAGGG |
| | | CACCAAGGTGGAGATCAAAGGCGGCGGCGGAAGTG |
| | | GAGGAGGAGGCTCAGGCGGAGGAGGGAGCGAGGTT |
| | | CAGCTGGTGGAGTCTGGCGGTGGCCTGGTGCAGCC |
| | | AGGGGGCTCACTCCGTTTGTCCTGTGCAGCTTCTG |
| | | GCTACTCCTTTACCGGCTACACTATGAACTGGGTG |
| | | CGTCAGGCCCCAGGTAAGGGCCTGGAATGGGTTGC |
| | | ACTGATTAATCCTTATAAAGGTGTTAGTACCTACA |
| | | ACCAGAAGTTCAAGGACCGTTTCACTATAAGCGTA |
| | | GATAAATCCAAAAACACAGCCTACCTGCAAATGAA |
| | | CAGCCTGCGTGCTGAGGACACTGCCGTCTATTATT |
| | | GTGCTAGAAGCGGATACTACGGCGATAGTGACTGG |
| | | TATTTTGACGTGTGGGGTCAAGGAACCCTGGTCAC |
| | | CGTCTCCTCGACATCTGGCGGCGGAGGATCTCTGG |
| | | AATCTGGACAGGTGCTGCTGGAAAGCAACATCAAG |
| | | GTGCTGCCCACCTGGTCTACCCCAGTTCAGCCTAT |
| | | GGCTCTGATTGTGCTTGGCGGAGTTGCCGGCCTGC |
| | | TGCTCTTTATCGGCCTGGGCATCTTCTTTTGCGTG |
| | | CGGTGCAGACATCGGCGGAGACAGGCTGAGAGAAT |
| | | GAGCCAGATCAAGCGGCTGCTGAGCGAGAAGAAAA |
| | | CCTGTCAGTGCCCTCACCGGTTCCAGAAAACATGC |
| | | AGCCCCATC |
| 650 | Nucleotide | ATGGCTCTGCCTGTGACAGCTCTGTTGCTGCCTCT |
| | | GGCTCTGCTGCTGCATGCTGCTAGACCTCAGGTGC |
| | | AGCTGAAGGAGAGCGGCGGCGGCCTGGTGCAGCCC |
| | | GGCGGCAGCCTGAAGCTGAGCTGCACCACCAGCGG |
| | | CTTCACCTTCAGCAGCTACGGCCTGAGCTGGATCA |
| | | GGCAGACCCCCGACAAGAGGCTGGAGCTGGTGGCC |
| | | AGCATCAACAGGAACGGCGACAACACCTACTACAC |
| | | CGACAGCGTGAGGGGCAGGTTCACCATCAGCAGGG |
| | | ACAACGCCAAGAGCACCCTGAACCTGCAGATGAGC |
| | | AGCCTGAAGAGCGAGGACACCGCCATGTACTACTG |
| | | CACCAGGGGCGGCTTCAGCTACTGGGGCCAGGGCA |
| | | CCCTGGTGACCGTGAGCGCCGGCAGCACCAGCGGC |
| | | AGCGGCAAGCCCGGCAGCGGCGAGGGCAGCACCAA |
| | | GGGCCAGATCGTGCTGACCCAGAGCCCCCCCCTGA |
| | | TGAGCGCCAGCCCCGGCGAGAAGGTGACCATGACC |
| | | TGCAGCGCCAGCAGCAGCGTGGGCTACATGTACTG |
| | | GTTCCAGCAGAGGCCCGGCAGCAGCCCCAGGCTGC |
| | | TGATCTACGACACCTACAACCTGGCCAGCGGCGTG |
| | | CCCGTGAGGTTCAGCGGCAGCGGCAGCGGCACCAG |
| | | CTACAGCCTGACCATCAGCAGGCTGGAGGCCGAGG |
| | | ACGCCGCCACCTACTACTGCCAGCAGTGGAGCGGC |
| | | TACCCCCCCATCACCTTCGGCGCCGGCACCAAGCT |
| | | GGAGCTGAGGGAGCAGAAACTGATCAGCGAGGAAG |
| | | ATCTGAATCCTGGCGGAGGCGGAGGAAGTGGTGGC |
| | | GGAGGTTCTGGTGGCGGTGGATCAGGCGGTGGCGG |
| | | ATCTGGATCTATGGATATCCAGATGACCCAGTCCC |
| | | CGAGCTCCCTGTCCGCCTCTGTGGGCGATAGGGTC |
| | | ACCATCACCTGCCGTGCCAGTCAGGACATCCGTAA |
| | | TTATCTGAACTGGTATCAACAGAAACCAGGAAAAG |
| | | CTCCGAAACTACTGATTTACTATACCTCCCGCCTG |
| | | GAGTCTGGAGTCCCTTCTCGCTTCTCTGGTTCTGG |
| | | TTCTGGGACGGATTACACTCTGACCATCAGCAGTC |
| | | TGCAACCGGAAGACTTCGCAACTTATTACTGTCAG |
| | | CAAGGTAATACTCTGCCGTGGACGTTCGGACAGGG |
| | | CACCAAGGTGGAGATCAAAGGCGGCGGCGGAAGTG |
| | | GAGGAGGAGGCTCAGGCGGAGGAGGGAGCGAGGTT |
| | | CAGCTGGTGGAGTCTGGCGGTGGCCTGGTGCAGCC |
| | | AGGGGGCTCACTCCGTTTGTCCTGTGCAGCTTCTG |
| | | GCTACTCCTTTACCGGCTACACTATGAACTGGGTG |
| | | CGTCAGGCCCCAGGTAAGGGCCTGGAATGGGTTGC |
| | | ACTGATTAATCCTTATAAAGGTGTTAGTACCTACA |
| | | ACCAGAAGTTCAAGGACCGTTTCACTATAAGCGTA |
| | | GATAAATCCAAAAACACAGCCTACCTGCAAATGAA |
| | | CAGCCTGCGTGCTGAGGACACTGCCGTCTATTATT |
| | | GTGCTAGAAGCGGATACTACGGCGATAGTGACTGG |
| | | TATTTTGACGTGTGGGGTCAAGGAACCCTGGTCAC |
| | | CGTCTCCTCGACATCTGGCGGCGGAGGATCTCTGG |
| | | AATCTGGACAGGTGCTGCTGGAAAGCAACATCAAG |
| | | GTGCTGCCCACCTGGTCTACCCCAGTTCAGCCTAT |
| | | GGCTCTGATTGTGCTTGGCGGAGTTGCCGGCCTGC |
| | | TGCTCTTTATCGGCCTGGGCATCTTCTTTTGCGTG |
| | | CGGTGCAGACATCGGCGGAGACAGGCTGAGAGAAT |
| | | GAGCCAGATCAAGCGGCTGCTGAGCGAGAAGAAAA |
| | | CCTGTCAGTGCCCTCACCGGTTCCAGAAAACATGC |
| | | AGCCCCATC |
| 651 | Nucleotide | ATGGCTCTGCCTGTGACAGCTCTGTTGCTGCCTCT |
| | | GGCTCTGCTGCTGCATGCTGCTAGACCTCAGATCG |
| | | TGCTGACCCAGAGCCCCCCCCTGATGAGCGCCAGC |
| | | CCCGGCGAGAAGGTGACCATGACCTGCAGCGCCAG |
| | | CAGCAGCGTGGGCTACATGTACTGGTTCCAGCAGA |
| | | GGCCCGGCAGCAGCCCCAGGCTGCTGATCTACGAC |
| | | ACCTACAACCTGGCCAGCGGCGTGCCCGTGAGGTT |
| | | CAGCGGCAGCGGCAGCGGCACCAGCTACAGCCTGA |
| | | CCATCAGCAGGCTGGAGGCCGAGGACGCCGCCACC |
| | | TACTACTGCCAGCAGTGGAGCGGCTACCCCCCCAT |
| | | CACCTTCGGCGCCGGCACCAAGCTGGAGCTGAGGG |
| | | GCAGCACCAGCGGCAGCGGCAAGCCCGGCAGCGGC |
| | | GAGGGCAGCACCAAGGGCCAGGTGCAGCTGAAGGA |
| | | GAGCGGCGGCGGCCTGGTGCAGCCCGGCGGCAGCC |
| | | TGAAGCTGAGCTGCACCACCAGCGGCTTCACCTTC |
| | | AGCAGCTACGGCCTGAGCTGGATCAGGCAGACCCC |
| | | CGACAAGAGGCTGGAGCTGGTGGCCAGCATCAACA |
| | | GGAACGGCGACAACACCTACTACACCGACAGCGTG |
| | | AGGGGCAGGTTCACCATCAGCAGGGACAACGCCAA |
| | | GAGCACCCTGAACCTGCAGATGAGCAGCCTGAAGA |
| | | GCGAGGACACCGCCATGTACTACTGCACCAGGGGC |
| | | GGCTTCAGCTACTGGGGCCAGGGCACCCTGGTGAC |
| | | CGTGAGCGCCGAGCAGAAACTGATCAGCGAGGAAG |
| | | ATCTGAATCCTGGCGGAGGCGGAGGAAGTGGTGGC |
| | | GGAGGTTCTGGTGGCGGTGGATCAGGCGGTGGCGG |
| | | ATCTGGATCTATGGATATCCAGATGACCCAGTCCC |
| | | CGAGCTCCCTGTCCGCCTCTGTGGGCGATAGGGTC |
| | | ACCATCACCTGCCGTGCCAGTCAGGACATCCGTAA |
| | | TTATCTGAACTGGTATCAACAGAAACCAGGAAAAG |
| | | CTCCGAAACTACTGATTTACTATACCTCCCGCCTG |
| | | GAGTCTGGAGTCCCTTCTCGCTTCTCTGGTTCTGG |
| | | TTCTGGGACGGATTACACTCTGACCATCAGCAGTC |
| | | TGCAACCGGAAGACTTCGCAACTTATTACTGTCAG |
| | | CAAGGTAATACTCTGCCGTGGACGTTCGGACAGGG |
| | | CACCAAGGTGGAGATCAAAGGCGGCGGCGGAAGTG |
| | | GAGGAGGAGGCTCAGGCGGAGGAGGGAGCGAGGTT |
| | | CAGCTGGTGGAGTCTGGCGGTGGCCTGGTGCAGCC |
| | | AGGGGGCTCACTCCGTTTGTCCTGTGCAGCTTCTG |
| | | GCTACTCCTTTACCGGCTACACTATGAACTGGGTG |
| | | CGTCAGGCCCCAGGTAAGGGCCTGGAATGGGTTGC |
| | | ACTGATTAATCCTTATAAAGGTGTTAGTACCTACA |
| | | ACCAGAAGTTCAAGGACCGTTTCACTATAAGCGTA |
| | | GATAAATCCAAAAACACAGCCTACCTGCAAATGAA |
| | | CAGCCTGCGTGCTGAGGACACTGCCGTCTATTATT |
| | | GTGCTAGAAGCGGATACTACGGCGATAGTGACTGG |
| | | TATTTTGACGTGTGGGGTCAAGGAACCCTGGTCAC |
| | | CGTCTCCTCGACATCTGGCGGCGGAGGATCTCTGG |
| | | AATCTGGACAGGTGCTGCTGGAAAGCAACATCAAG |
| | | GTGCTGCCCACCTGGTCTACCCCAGTTCAGCCTAT |
| | | GGCTCTGATTGTGCTTGGCGGAGTTGCCGGCCTGC |
| | | TGCTCTTTATCGGCCTGGGCATCTTCTTTTGCGTG |
| | | CGGTGCAGACATCGGCGGAGACAGGCTGAGAGAAT |
| | | GAGCCAGATCAAGCGGCTGCTGAGCGAGAAGAAAA |
| | | CCTGTCAGTGCCCTCACCGGTTCCAGAAAACATGC |
| | | AGCCCCATC |
| 652 | Nucleotide | ATGGCTCTGCCTGTGACAGCTCTGTTGCTGCCTCT |
| | | GGCTCTGCTGCTGCATGCTGCTAGACCTCAGGTGC |
| | | AGCTGAAGGAGAGCGGCGGCGGCCTGGTGAGGCCC |
| | | GGCGGCAGCCTGAAGCTGAGCTGCGCCGCCAGCGG |
| | | CTTCACCTTCAGCAACTACGGCATGAGCTGGATCA |
| | | GGCAGACCCCCGACAAGAACCTGGAGCTGGTGGCC |
| | | AGCATCAACACCAGCGGCGGCAACACCTACTACCC |
| | | CGACAGCGTGAAGGGCAGGTTCACCATCAGCAGGG |
| | | ACAACGCCAGGGCCACCCTGAACCTGCAGATGAGC |
| | | AACCTGAAGAGCGAGGACACCGCCATCTACTACTG |
| | | CACCAGGGGCGGCTTCACCCACTGGGGCCAGGGCA |
| | | CCCTGGTGGCCGTGAGCGCCGGCAGCACCAGCGGC |
| | | AGCGGCAAGCCCGGCAGCGGCGAGGGCAGCACCAA |
| | | GGGCCAGATCGTGCTGACCCAGAGCCCCGCCATCA |
| | | TGAGCGCCAGCCCCGGCGAGAAGGTGACCATGACC |
| | | TGCAGCGCCAGCAGCAGCGTGAGCTACATGTACTG |
| | | GTACCAGCAGAAGCCCGGCAGCAGCCCCAGGCTGC |
| | | TGATCTACGACACCAGCAACCTGGCCAGCGGCGTG |
| | | CCCGTGAGGTTCAGCGGCAGCGGCAGCGGCACCAG |
| | | CTACTTCCTGACCATCAGCAGGATGGAGGCCGAGG |
| | | ACGCCGCCACCTACTACTGCCAGCAGTGGACCGGC |
| | | TACCCCCCCATCACCTTCGGCGCCGGCACCAAGCT |
| | | GGAGCTGAGGGAGCAGAAACTGATCAGCGAGGAAG |
| | | ATCTGAATCCTGGCGGAGGCGGAGGAAGTGGTGGC |
| | | GGAGGTTCTGGTGGCGGTGGATCAGGCGGTGGCGG |
| | | ATCTGGATCTATGGATATCCAGATGACCCAGTCCC |
| | | CGAGCTCCCTGTCCGCCTCTGTGGGCGATAGGGTC |
| | | ACCATCACCTGCCGTGCCAGTCAGGACATCCGTAA |
| | | TTATCTGAACTGGTATCAACAGAAACCAGGAAAAG |
| | | CTCCGAAACTACTGATTTACTATACCTCCCGCCTG |
| | | GAGTCTGGAGTCCCTTCTCGCTTCTCTGGTTCTGG |
| | | TTCTGGGACGGATTACACTCTGACCATCAGCAGTC |
| | | TGCAACCGGAAGACTTCGCAACTTATTACTGTCAG |
| | | CAAGGTAATACTCTGCCGTGGACGTTCGGACAGGG |
| | | CACCAAGGTGGAGATCAAAGGCGGCGGCGGAAGTG |
| | | GAGGAGGAGGCTCAGGCGGAGGAGGGAGCGAGGTT |
| | | CAGCTGGTGGAGTCTGGCGGTGGCCTGGTGCAGCC |
| | | AGGGGGCTCACTCCGTTTGTCCTGTGCAGCTTCTG |
| | | GCTACTCCTTTACCGGCTACACTATGAACTGGGTG |
| | | CGTCAGGCCCCAGGTAAGGGCCTGGAATGGGTTGC |
| | | ACTGATTAATCCTTATAAAGGTGTTAGTACCTACA |
| | | ACCAGAAGTTCAAGGACCGTTTCACTATAAGCGTA |
| | | GATAAATCCAAAAACACAGCCTACCTGCAAATGAA |
| | | CAGCCTGCGTGCTGAGGACACTGCCGTCTATTATT |
| | | GTGCTAGAAGCGGATACTACGGCGATAGTGACTGG |
| | | TATTTTGACGTGTGGGGTCAAGGAACCCTGGTCAC |
| | | CGTCTCCTCGACATCTGGCGGCGGAGGATCTCTGG |
| | | AATCTGGACAGGTGCTGCTGGAAAGCAACATCAAG |
| | | GTGCTGCCCACCTGGTCTACCCCAGTTCAGCCTAT |
| | | GGCTCTGATTGTGCTTGGCGGAGTTGCCGGCCTGC |
| | | TGCTCTTTATCGGCCTGGGCATCTTCTTTTGCGTG |
| | | CGGTGCAGACATCGGCGGAGACAGGCTGAGAGAAT |
| | | GAGCCAGATCAAGCGGCTGCTGAGCGAGAAGAAAA |
| | | CCTGTCAGTGCCCTCACCGGTTCCAGAAAACATGC |
| | | AGCCCCATC |
| 653 | Nucleotide | ATGGCTCTGCCTGTGACAGCTCTGTTGCTGCCTCT |
| | | GGCTCTGCTGCTGCATGCTGCTAGACCTCAGATCG |
| | | TGCTGACCCAGAGCCCCGCCATCATGAGCGCCAGC |
| | | CCCGGCGAGAAGGTGACCATGACCTGCAGCGCCAG |
| | | CAGCAGCGTGAGCTACATGTACTGGTACCAGCAGA |
| | | AGCCCGGCAGCAGCCCCAGGCTGCTGATCTACGAC |
| | | ACCAGCAACCTGGCCAGCGGCGTGCCCGTGAGGTT |
| | | CAGCGGCAGCGGCAGCGGCACCAGCTACTTCCTGA |
| | | CCATCAGCAGGATGGAGGCCGAGGACGCCGCCACC |
| | | TACTACTGCCAGCAGTGGACCGGCTACCCCCCCAT |
| | | CACCTTCGGCGCCGGCACCAAGCTGGAGCTGAGGG |
| | | GCAGCACCAGCGGCAGCGGCAAGCCCGGCAGCGGC |
| | | GAGGGCAGCACCAAGGGCCAGGTGCAGCTGAAGGA |
| | | GAGCGGCGGCGGCCTGGTGAGGCCCGGCGGCAGCC |
| | | TGAAGCTGAGCTGCGCCGCCAGCGGCTTCACCTTC |
| | | AGCAACTACGGCATGAGCTGGATCAGGCAGACCCC |
| | | CGACAAGAACCTGGAGCTGGTGGCCAGCATCAACA |
| | | CCAGCGGCGGCAACACCTACTACCCCGACAGCGTG |
| | | AAGGGCAGGTTCACCATCAGCAGGGACAACGCCAG |
| | | GGCCACCCTGAACCTGCAGATGAGCAACCTGAAGA |
| | | GCGAGGACACCGCCATCTACTACTGCACCAGGGGC |
| | | GGCTTCACCCACTGGGGCCAGGGCACCCTGGTGGC |
| | | CGTGAGCGCCGAGCAGAAACTGATCAGCGAGGAAG |
| | | ATCTGAATCCTGGCGGAGGCGGAGGAAGTGGTGGC |
| | | GGAGGTTCTGGTGGCGGTGGATCAGGCGGTGGCGG |
| | | ATCTGGATCTATGGATATCCAGATGACCCAGTCCC |
| | | CGAGCTCCCTGTCCGCCTCTGTGGGCGATAGGGTC |
| | | ACCATCACCTGCCGTGCCAGTCAGGACATCCGTAA |
| | | TTATCTGAACTGGTATCAACAGAAACCAGGAAAAG |
| | | CTCCGAAACTACTGATTTACTATACCTCCCGCCTG |
| | | GAGTCTGGAGTCCCTTCTCGCTTCTCTGGTTCTGG |
| | | TTCTGGGACGGATTACACTCTGACCATCAGCAGTC |
| | | TGCAACCGGAAGACTTCGCAACTTATTACTGTCAG |
| | | CAAGGTAATACTCTGCCGTGGACGTTCGGACAGGG |
| | | CACCAAGGTGGAGATCAAAGGCGGCGGCGGAAGTG |
| | | GAGGAGGAGGCTCAGGCGGAGGAGGGAGCGAGGTT |
| | | CAGCTGGTGGAGTCTGGCGGTGGCCTGGTGCAGCC |
| | | AGGGGGCTCACTCCGTTTGTCCTGTGCAGCTTCTG |
| | | GCTACTCCTTTACCGGCTACACTATGAACTGGGTG |
| | | CGTCAGGCCCCAGGTAAGGGCCTGGAATGGGTTGC |
| | | ACTGATTAATCCTTATAAAGGTGTTAGTACCTACA |
| | | ACCAGAAGTTCAAGGACCGTTTCACTATAAGCGTA |
| | | GATAAATCCAAAAACACAGCCTACCTGCAAATGAA |
| | | CAGCCTGCGTGCTGAGGACACTGCCGTCTATTATT |
| | | GTGCTAGAAGCGGATACTACGGCGATAGTGACTGG |
| | | TATTTTGACGTGTGGGGTCAAGGAACCCTGGTCAC |
| | | CGTCTCCTCGACATCTGGCGGCGGAGGATCTCTGG |
| | | AATCTGGACAGGTGCTGCTGGAAAGCAACATCAAG |
| | | GTGCTGCCCACCTGGTCTACCCCAGTTCAGCCTAT |
| | | GGCTCTGATTGTGCTTGGCGGAGTTGCCGGCCTGC |
| | | TGCTCTTTATCGGCCTGGGCATCTTCTTTTGCGTG |
| | | CGGTGCAGACATCGGCGGAGACAGGCTGAGAGAAT |
| | | GAGCCAGATCAAGCGGCTGCTGAGCGAGAAGAAAA |
| | | CCTGTCAGTGCCCTCACCGGTTCCAGAAAACATGC |
| | | AGCCCCATC |
| 654 | Nucleotide | ATGGCTCTGCCTGTGACAGCTCTGTTGCTGCCTCT |
| | | GGCTCTGCTGCTGCATGCTGCTAGACCTCAGGTGC |
| | | AGCTGAAGGAGAGCGGCGGCGGCCTGGTGCAGCCC |
| | | GGCGGCAGCCTGAAGCTGAGCTGCGCCGCCAGCGG |
| | | CTTCCCCTTCAGCAGCTACGGCCTGAGCTGGGTGA |
| | | GGCAGACCCCCGACAAGAGGCTGGAGCTGGTGGCC |
| | | ACCATCAACAGGAACGGCGACAGCGCCTACTACCC |
| | | CGACAGCGTGAAGGGCAGGTTCACCATCAGCAGGG |
| | | ACGACGCCAAGAACACCCTGTACCTGCAGATGAGC |
| | | AGCCTGAAGAGCGAGGACACCGCCATGTACTACTG |
| | | CACCAGGGGCGGCTTCGCCTACTGGGGCCAGGGCA |
| | | CCCTGGTGACCGTGAGCGCCGGCAGCACCAGCGGC |
| | | AGCGGCAAGCCCGGCAGCGGCGAGGGCAGCACCAA |
| | | GGGCCAGATCGTGCTGACCCAGAGCCCCGCCATCA |
| | | TGAGCGCCAGCCCCGGCGAGAAGGTGACCATGACC |
| | | TGCAGCGGCAGCAGCAGCGTGGGCTACATGTACTG |
| | | GTACCAGCAGAAGCCCGGCTTCAGCCCCAGGCTGC |
| | | TGATCTACGACACCAGCAACCTGGCCAGCGGCGTG |
| | | CCCGTGAGGTTCAGCGGCAGCGGCAGCGGCACCAG |
| | | CTACAGCCTGACCATCAGCAGGATGGAGGCCGAGG |
| | | ACGCCGCCACCTACTACTGCCAGCAGTGGAGCGGC |
| | | TACCCCCCCATCACCTTCGGCGCCGGCACCAAGCT |
| | | GGAGCTGAAGGAGCAGAAACTGATCAGCGAGGAAG |
| | | ATCTGAATCCTGGCGGAGGCGGAGGAAGTGGTGGC |
| | | GGAGGTTCTGGTGGCGGTGGATCAGGCGGTGGCGG |
| | | ATCTGGATCTATGGATATCCAGATGACCCAGTCCC |
| | | CGAGCTCCCTGTCCGCCTCTGTGGGCGATAGGGTC |
| | | ACCATCACCTGCCGTGCCAGTCAGGACATCCGTAA |
| | | TTATCTGAACTGGTATCAACAGAAACCAGGAAAAG |
| | | CTCCGAAACTACTGATTTACTATACCTCCCGCCTG |
| | | GAGTCTGGAGTCCCTTCTCGCTTCTCTGGTTCTGG |
| | | TTCTGGGACGGATTACACTCTGACCATCAGCAGTC |
| | | TGCAACCGGAAGACTTCGCAACTTATTACTGTCAG |
| | | CAAGGTAATACTCTGCCGTGGACGTTCGGACAGGG |
| | | CACCAAGGTGGAGATCAAAGGCGGCGGCGGAAGTG |
| | | GAGGAGGAGGCTCAGGCGGAGGAGGGAGCGAGGTT |
| | | CAGCTGGTGGAGTCTGGCGGTGGCCTGGTGCAGCC |
| | | AGGGGGCTCACTCCGTTTGTCCTGTGCAGCTTCTG |
| | | GCTACTCCTTTACCGGCTACACTATGAACTGGGTG |
| | | CGTCAGGCCCCAGGTAAGGGCCTGGAATGGGTTGC |
| | | ACTGATTAATCCTTATAAAGGTGTTAGTACCTACA |
| | | ACCAGAAGTTCAAGGACCGTTTCACTATAAGCGTA |
| | | GATAAATCCAAAAACACAGCCTACCTGCAAATGAA |
| | | CAGCCTGCGTGCTGAGGACACTGCCGTCTATTATT |
| | | GTGCTAGAAGCGGATACTACGGCGATAGTGACTGG |
| | | TATTTTGACGTGTGGGGTCAAGGAACCCTGGTCAC |
| | | CGTCTCCTCGACATCTGGCGGCGGAGGATCTCTGG |
| | | AATCTGGACAGGTGCTGCTGGAAAGCAACATCAAG |
| | | GTGCTGCCCACCTGGTCTACCCCAGTTCAGCCTAT |
| | | GGCTCTGATTGTGCTTGGCGGAGTTGCCGGCCTGC |
| | | TGCTCTTTATCGGCCTGGGCATCTTCTTTTGCGTG |
| | | CGGTGCAGACATCGGCGGAGACAGGCTGAGAGAAT |
| | | GAGCCAGATCAAGCGGCTGCTGAGCGAGAAGAAAA |
| | | CCTGTCAGTGCCCTCACCGGTTCCAGAAAACATGC |
| | | AGCCCCATC |
| 655 | Nucleotide | ATGGCTCTGCCTGTGACAGCTCTGTTGCTGCCTCT |
| | | GGCTCTGCTGCTGCATGCTGCTAGACCTCAGATCG |
| | | TGCTGACCCAGAGCCCCGCCATCATGAGCGCCAGC |
| | | CCCGGCGAGAAGGTGACCATGACCTGCAGCGGCAG |
| | | CAGCAGCGTGGGCTACATGTACTGGTACCAGCAGA |
| | | AGCCCGGCTTCAGCCCCAGGCTGCTGATCTACGAC |
| | | ACCAGCAACCTGGCCAGCGGCGTGCCCGTGAGGTT |
| | | CAGCGGCAGCGGCAGCGGCACCAGCTACAGCCTGA |
| | | CCATCAGCAGGATGGAGGCCGAGGACGCCGCCACC |
| | | TACTACTGCCAGCAGTGGAGCGGCTACCCCCCCAT |
| | | CACCTTCGGCGCCGGCACCAAGCTGGAGCTGAAGG |
| | | GCAGCACCAGCGGCAGCGGCAAGCCCGGCAGCGGC |
| | | GAGGGCAGCACCAAGGGCCAGGTGCAGCTGAAGGA |
| | | GAGCGGCGGCGGCCTGGTGCAGCCCGGCGGCAGCC |
| | | TGAAGCTGAGCTGCGCCGCCAGCGGCTTCCCCTTC |
| | | AGCAGCTACGGCCTGAGCTGGGTGAGGCAGACCCC |
| | | CGACAAGAGGCTGGAGCTGGTGGCCACCATCAACA |
| | | GGAACGGCGACAGCGCCTACTACCCCGACAGCGTG |
| | | AAGGGCAGGTTCACCATCAGCAGGGACGACGCCAA |
| | | GAACACCCTGTACCTGCAGATGAGCAGCCTGAAGA |
| | | GCGAGGACACCGCCATGTACTACTGCACCAGGGGC |
| | | GGCTTCGCCTACTGGGGCCAGGGCACCCTGGTGAC |
| | | CGTGAGCGCCGAGCAGAAACTGATCAGCGAGGAAG |
| | | ATCTGAATCCTGGCGGAGGCGGAGGAAGTGGTGGC |
| | | GGAGGTTCTGGTGGCGGTGGATCAGGCGGTGGCGG |
| | | ATCTGGATCTATGGATATCCAGATGACCCAGTCCC |
| | | CGAGCTCCCTGTCCGCCTCTGTGGGCGATAGGGTC |
| | | ACCATCACCTGCCGTGCCAGTCAGGACATCCGTAA |
| | | TTATCTGAACTGGTATCAACAGAAACCAGGAAAAG |
| | | CTCCGAAACTACTGATTTACTATACCTCCCGCCTG |
| | | GAGTCTGGAGTCCCTTCTCGCTTCTCTGGTTCTGG |
| | | TTCTGGGACGGATTACACTCTGACCATCAGCAGTC |
| | | TGCAACCGGAAGACTTCGCAACTTATTACTGTCAG |
| | | CAAGGTAATACTCTGCCGTGGACGTTCGGACAGGG |
| | | CACCAAGGTGGAGATCAAAGGCGGCGGCGGAAGTG |
| | | GAGGAGGAGGCTCAGGCGGAGGAGGGAGCGAGGTT |
| | | CAGCTGGTGGAGTCTGGCGGTGGCCTGGTGCAGCC |
| | | AGGGGGCTCACTCCGTTTGTCCTGTGCAGCTTCTG |
| | | GCTACTCCTTTACCGGCTACACTATGAACTGGGTG |
| | | CGTCAGGCCCCAGGTAAGGGCCTGGAATGGGTTGC |
| | | ACTGATTAATCCTTATAAAGGTGTTAGTACCTACA |
| | | ACCAGAAGTTCAAGGACCGTTTCACTATAAGCGTA |
| | | GATAAATCCAAAAACACAGCCTACCTGCAAATGAA |
| | | CAGCCTGCGTGCTGAGGACACTGCCGTCTATTATT |
| | | GTGCTAGAAGCGGATACTACGGCGATAGTGACTGG |
| | | TATTTTGACGTGTGGGGTCAAGGAACCCTGGTCAC |
| | | CGTCTCCTCGACATCTGGCGGCGGAGGATCTCTGG |
| | | AATCTGGACAGGTGCTGCTGGAAAGCAACATCAAG |
| | | GTGCTGCCCACCTGGTCTACCCCAGTTCAGCCTAT |
| | | GGCTCTGATTGTGCTTGGCGGAGTTGCCGGCCTGC |
| | | TGCTCTTTATCGGCCTGGGCATCTTCTTTTGCGTG |
| | | CGGTGCAGACATCGGCGGAGACAGGCTGAGAGAAT |
| | | GAGCCAGATCAAGCGGCTGCTGAGCGAGAAGAAAA |
| | | CCTGTCAGTGCCCTCACCGGTTCCAGAAAACATGC |
| | | AGCCCCATC |
| 656 | Nucleotide | ATGGCTCTGCCTGTGACAGCTCTGTTGCTGCCTCT |
| | | GGCTCTGCTGCTGCATGCTGCTAGACCTCAGGTGC |
| | | AGCTGCAGGAGAGCGGCGGCGGCCTGGTGCAGCCC |
| | | GGCGGCAGCCTGAGGCTGAGCTGCGCCGCCAGCAG |
| | | GAGCATCTTCGGCATCGCCTTCATGGACTGGTACA |
| | | GGCAGGCCCCCGGCAAGCAGAGGGAGTTCGTGGCC |
| | | GGCATCAGCCACAGCGGCGCCACCAGCTACGCCGA |
| | | CAGCGTGAAGGGCAGGTTCACCGTGAGCAGGGACA |
| | | ACGCCAAGAACACCATGTACCTGCAGATGAACAAC |
| | | CTGCTGCCCGAGGACAGCGCCGTGTACTACTGCAA |
| | | GGCCGACACCGCCACCAACACCGACTGGGGCCAGG |
| | | GCACCCAGGTGACCGTGAGCAGCGAGCAGAAACTG |
| | | ATCAGCGAGGAAGATCTGAATCCTGGCGGAGGCGG |
| | | AGGAAGTGGTGGCGGAGGTTCTGGTGGCGGTGGAT |
| | | CAGGCGGTGGCGGATCTGGATCTATGGATATCCAG |
| | | ATGACCCAGTCCCCGAGCTCCCTGTCCGCCTCTGT |
| | | GGGCGATAGGGTCACCATCACCTGCCGTGCCAGTC |
| | | AGGACATCCGTAATTATCTGAACTGGTATCAACAG |
| | | AAACCAGGAAAAGCTCCGAAACTACTGATTTACTA |
| | | TACCTCCCGCCTGGAGTCTGGAGTCCCTTCTCGCT |
| | | TCTCTGGTTCTGGTTCTGGGACGGATTACACTCTG |
| | | ACCATCAGCAGTCTGCAACCGGAAGACTTCGCAAC |
| | | TTATTACTGTCAGCAAGGTAATACTCTGCCGTGGA |
| | | CGTTCGGACAGGGCACCAAGGTGGAGATCAAAGGC |
| | | GGCGGCGGAAGTGGAGGAGGAGGCTCAGGCGGAGG |
| | | AGGGAGCGAGGTTCAGCTGGTGGAGTCTGGCGGTG |
| | | GCCTGGTGCAGCCAGGGGGCTCACTCCGTTTGTCC |
| | | TGTGCAGCTTCTGGCTACTCCTTTACCGGCTACAC |
| | | TATGAACTGGGTGCGTCAGGCCCCAGGTAAGGGCC |
| | | TGGAATGGGTTGCACTGATTAATCCTTATAAAGGT |
| | | GTTAGTACCTACAACCAGAAGTTCAAGGACCGTTT |
| | | CACTATAAGCGTAGATAAATCCAAAAACACAGCCT |
| | | ACCTGCAAATGAACAGCCTGCGTGCTGAGGACACT |
| | | GCCGTCTATTATTGTGCTAGAAGCGGATACTACGG |
| | | CGATAGTGACTGGTATTTTGACGTGTGGGGTCAAG |
| | | GAACCCTGGTCACCGTCTCCTCGACATCTGGCGGC |
| | | GGAGGATCTCTGGAATCTGGACAGGTGCTGCTGGA |
| | | AAGCAACATCAAGGTGCTGCCCACCTGGTCTACCC |
| | | CAGTTCAGCCTATGGCTCTGATTGTGCTTGGCGGA |
| | | GTTGCCGGCCTGCTGCTCTTTATCGGCCTGGGCAT |
| | | CTTCTTTTGCGTGCGGTGCAGACATCGGCGGAGAC |
| | | AGGCTGAGAGAATGAGCCAGATCAAGCGGCTGCTG |
| | | AGCGAGAAGAAAACCTGTCAGTGCCCTCACCGGTT |
| | | CCAGAAAACATGCAGCCCCATC |
| 657 | Nucleotide | ATGGCTCTGCCTGTGACAGCTCTGTTGCTGCCTCT |
| | | GGCTCTGCTGCTGCATGCTGCTAGACCTGAGGTGC |
| | | AGCTGGTGGAGAGCGGCGGCGGCCTGGTGCAGCCC |
| | | GGCGGCAGCCTGAGGCTGAGCTGCGCCGCCAGCAG |
| | | GAGCATCTTCGTGATCGCCTTCATGGACTGGTACA |
| | | GGCAGGCCCCCGGCAAGCAGAGGGAGTTCGTGGCC |
| | | GGCATCAGCAGCAGCGGCGCCACCAGCTACGCCAG |
| | | CAGCGTGAAGGGCAGGTTCACCGTGAGCAGGGACA |
| | | CCGCCAAGAACACCATGTACCTGCAGATGAACAAC |
| | | CTGCTGCCCGAGGACAGCGCCGTGTACTACTGCAA |
| | | GGCCGACACCGCCACCACCACCGACTGGGGCCAGG |
| | | GCACCCAGGTGACCGTGAGCAGCGAGCAGAAACTG |
| | | ATCAGCGAGGAAGATCTGAATCCTGGCGGAGGCGG |
| | | AGGAAGTGGTGGCGGAGGTTCTGGTGGCGGTGGAT |
| | | CAGGCGGTGGCGGATCTGGATCTATGGATATCCAG |
| | | ATGACCCAGTCCCCGAGCTCCCTGTCCGCCTCTGT |
| | | GGGCGATAGGGTCACCATCACCTGCCGTGCCAGTC |
| | | AGGACATCCGTAATTATCTGAACTGGTATCAACAG |
| | | AAACCAGGAAAAGCTCCGAAACTACTGATTTACTA |
| | | TACCTCCCGCCTGGAGTCTGGAGTCCCTTCTCGCT |
| | | TCTCTGGTTCTGGTTCTGGGACGGATTACACTCTG |
| | | ACCATCAGCAGTCTGCAACCGGAAGACTTCGCAAC |
| | | TTATTACTGTCAGCAAGGTAATACTCTGCCGTGGA |
| | | CGTTCGGACAGGGCACCAAGGTGGAGATCAAAGGC |
| | | GGCGGCGGAAGTGGAGGAGGAGGCTCAGGCGGAGG |
| | | AGGGAGCGAGGTTCAGCTGGTGGAGTCTGGCGGTG |
| | | GCCTGGTGCAGCCAGGGGGCTCACTCCGTTTGTCC |
| | | TGTGCAGCTTCTGGCTACTCCTTTACCGGCTACAC |
| | | TATGAACTGGGTGCGTCAGGCCCCAGGTAAGGGCC |
| | | TGGAATGGGTTGCACTGATTAATCCTTATAAAGGT |
| | | GTTAGTACCTACAACCAGAAGTTCAAGGACCGTTT |
| | | CACTATAAGCGTAGATAAATCCAAAAACACAGCCT |
| | | ACCTGCAAATGAACAGCCTGCGTGCTGAGGACACT |
| | | GCCGTCTATTATTGTGCTAGAAGCGGATACTACGG |
| | | CGATAGTGACTGGTATTTTGACGTGTGGGGTCAAG |
| | | GAACCCTGGTCACCGTCTCCTCGACATCTGGCGGC |
| | | GGAGGATCTCTGGAATCTGGACAGGTGCTGCTGGA |
| | | AAGCAACATCAAGGTGCTGCCCACCTGGTCTACCC |
| | | CAGTTCAGCCTATGGCTCTGATTGTGCTTGGCGGA |
| | | GTTGCCGGCCTGCTGCTCTTTATCGGCCTGGGCAT |
| | | CTTCTTTTGCGTGCGGTGCAGACATCGGCGGAGAC |
| | | AGGCTGAGAGAATGAGCCAGATCAAGCGGCTGCTG |
| | | AGCGAGAAGAAAACCTGTCAGTGCCCTCACCGGTT |
| | | CCAGAAAACATGCAGCCCCATC |
| 658 | Nucleotide | ATGGCTCTGCCTGTGACAGCTCTGTTGCTGCCTCT |
| | | GGCTCTGCTGCTGCATGCTGCTAGACCTGAGGTGC |
| | | AGCTGGTGGAGAGCGGCGGCGGCCTGGTGCAGCCC |
| | | GGCGGCAGCCTGAGGCTGAGCTGCGCCGCCAGCGG |
| | | CATCATCTTCAGCATCAACACCATGGCCTGGTACA |
| | | GGCAGGGCCCCGGCAAGGAGAGGGACCTGGTGGCC |
| | | GTGATCAAGGGCGACGGCAGCACCAGCTACGCCGA |
| | | CAGCGTGAACGGCAGGTTCACCATCAGCAGGGACA |
| | | ACGCCAAGAACACCGTGTACCTGAGGATGAACGGC |
| | | CTGAAGCCCGAGGACACCGCCGTGTACTACTGCAA |
| | | CAGCGCCGGCAGGAGCTACAGCGGCGTGTACGGCG |
| | | CCTACTGGGGCCAGGGCACCCAGGTGACCGTGAGC |
| | | AGCGAGCAGAAACTGATCAGCGAGGAAGATCTGAA |
| | | TCCTGGCGGAGGCGGAGGAAGTGGTGGCGGAGGTT |
| | | CTGGTGGCGGTGGATCAGGCGGTGGCGGATCTGGA |
| | | TCTATGGATATCCAGATGACCCAGTCCCCGAGCTC |
| | | CCTGTCCGCCTCTGTGGGCGATAGGGTCACCATCA |
| | | CCTGCCGTGCCAGTCAGGACATCCGTAATTATCTG |
| | | AACTGGTATCAACAGAAACCAGGAAAAGCTCCGAA |
| | | ACTACTGATTTACTATACCTCCCGCCTGGAGTCTG |
| | | GAGTCCCTTCTCGCTTCTCTGGTTCTGGTTCTGGG |
| | | ACGGATTACACTCTGACCATCAGCAGTCTGCAACC |
| | | GGAAGACTTCGCAACTTATTACTGTCAGCAAGGTA |
| | | ATACTCTGCCGTGGACGTTCGGACAGGGCACCAAG |
| | | GTGGAGATCAAAGGCGGCGGCGGAAGTGGAGGAGG |
| | | AGGCTCAGGCGGAGGAGGGAGCGAGGTTCAGCTGG |
| | | TGGAGTCTGGCGGTGGCCTGGTGCAGCCAGGGGGC |
| | | TCACTCCGTTTGTCCTGTGCAGCTTCTGGCTACTC |
| | | CTTTACCGGCTACACTATGAACTGGGTGCGTCAGG |
| | | CCCCAGGTAAGGGCCTGGAATGGGTTGCACTGATT |
| | | AATCCTTATAAAGGTGTTAGTACCTACAACCAGAA |
| | | GTTCAAGGACCGTTTCACTATAAGCGTAGATAAAT |
| | | CCAAAAACACAGCCTACCTGCAAATGAACAGCCTG |
| | | CGTGCTGAGGACACTGCCGTCTATTATTGTGCTAG |
| | | AAGCGGATACTACGGCGATAGTGACTGGTATTTTG |
| | | ACGTGTGGGGTCAAGGAACCCTGGTCACCGTCTCC |
| | | TCGACATCTGGCGGCGGAGGATCTCTGGAATCTGG |
| | | ACAGGTGCTGCTGGAAAGCAACATCAAGGTGCTGC |
| | | CCACCTGGTCTACCCCAGTTCAGCCTATGGCTCTG |
| | | ATTGTGCTTGGCGGAGTTGCCGGCCTGCTGCTCTT |
| | | TATCGGCCTGGGCATCTTCTTTTGCGTGCGGTGCA |
| | | GACATCGGCGGAGACAGGCTGAGAGAATGAGCCAG |
| | | ATCAAGCGGCTGCTGAGCGAGAAGAAAACCTGTCA |
| | | GTGCCCTCACCGGTTCCAGAAAACATGCAGCCCCA |
| | | TC |
| 659 | Nucleotide | ATGGCTCTGCCTGTGACAGCTCTGTTGCTGCCTCT |
| | | GGCTCTGCTGCTGCATGCTGCTAGACCTGAGGTGC |
| | | AGCTGCAGGAGAGCGGCGGCGGCCTGGTGCAGCCC |
| | | GGCGGCAGCCTGAAGCTGAGCTGCGCCGCCAGCGG |
| | | CAGCATCTTCAGCATCGGCGCCATGAGGTGGTACA |
| | | GGCAGGTGCCCGGCAACGAGAGGGAGCTGGTGGCC |
| | | GGCATCACCAACGGCGGCAACACCAACTACGCCGA |
| | | CAGCGTGAAGGCCAGGTTCACCATCAGCAGGGACA |
| | | ACGCCAAGAACACCGTGTACCTGCAGATGAACAGC |
| | | CTGAAGCCCGAGGACACCACCGTGTACTTCTGCAA |
| | | CGCCGACGTGCAGAACAGCGGCTACGTGTGGGGCA |
| | | ACTACTGGGGCCAGGGCACCCAGGTGACCGTGAGC |
| | | AGCGAGCAGAAACTGATCAGCGAGGAAGATCTGAA |
| | | TCCTGGCGGAGGCGGAGGAAGTGGTGGCGGAGGTT |
| | | CTGGTGGCGGTGGATCAGGCGGTGGCGGATCTGGA |
| | | TCTATGGATATCCAGATGACCCAGTCCCCGAGCTC |
| | | CCTGTCCGCCTCTGTGGGCGATAGGGTCACCATCA |
| | | CCTGCCGTGCCAGTCAGGACATCCGTAATTATCTG |
| | | AACTGGTATCAACAGAAACCAGGAAAAGCTCCGAA |
| | | ACTACTGATTTACTATACCTCCCGCCTGGAGTCTG |
| | | GAGTCCCTTCTCGCTTCTCTGGTTCTGGTTCTGGG |
| | | ACGGATTACACTCTGACCATCAGCAGTCTGCAACC |
| | | GGAAGACTTCGCAACTTATTACTGTCAGCAAGGTA |
| | | ATACTCTGCCGTGGACGTTCGGACAGGGCACCAAG |
| | | GTGGAGATCAAAGGCGGCGGCGGAAGTGGAGGAGG |
| | | AGGCTCAGGCGGAGGAGGGAGCGAGGTTCAGCTGG |
| | | TGGAGTCTGGCGGTGGCCTGGTGCAGCCAGGGGGC |
| | | TCACTCCGTTTGTCCTGTGCAGCTTCTGGCTACTC |
| | | CTTTACCGGCTACACTATGAACTGGGTGCGTCAGG |
| | | CCCCAGGTAAGGGCCTGGAATGGGTTGCACTGATT |
| | | AATCCTTATAAAGGTGTTAGTACCTACAACCAGAA |
| | | GTTCAAGGACCGTTTCACTATAAGCGTAGATAAAT |
| | | CCAAAAACACAGCCTACCTGCAAATGAACAGCCTG |
| | | CGTGCTGAGGACACTGCCGTCTATTATTGTGCTAG |
| | | AAGCGGATACTACGGCGATAGTGACTGGTATTTTG |
| | | ACGTGTGGGGTCAAGGAACCCTGGTCACCGTCTCC |
| | | TCGACATCTGGCGGCGGAGGATCTCTGGAATCTGG |
| | | ACAGGTGCTGCTGGAAAGCAACATCAAGGTGCTGC |
| | | CCACCTGGTCTACCCCAGTTCAGCCTATGGCTCTG |
| | | ATTGTGCTTGGCGGAGTTGCCGGCCTGCTGCTCTT |
| | | TATCGGCCTGGGCATCTTCTTTTGCGTGCGGTGCA |
| | | GACATCGGCGGAGACAGGCTGAGAGAATGAGCCAG |
| | | ATCAAGCGGCTGCTGAGCGAGAAGAAAACCTGTCA |
| | | GTGCCCTCACCGGTTCCAGAAAACATGCAGCCCCA |
| | | TC |
| 660 | Nucleotide | ATGGCTCTGCCTGTGACAGCTCTGTTGCTGCCTCT |
| | | GGCTCTGCTGCTGCATGCTGCTAGACCTGAGGTGC |
| | | AGCTGGTGGAGAGCGGCGGCGGCCTGGTGCAGCCC |
| | | GGCGGCAGCCTGAGGCTGAGCTGCGCCGCCAGCAG |
| | | GAGCATCTTCGTGATCGCCTTCATGGACTGGTACA |
| | | GGCAGGCCCCCGGCAAGCAGAGGGAGTTCGTGGCC |
| | | GGCATCAGCAGCAGCGGCGCCACCAGCTACGCCGA |
| | | CAGCGTGAAGGGCAGGTTCACCGTGAGCAGGGACA |
| | | CCGCCAAGAACACCATGTACCTGCAGATGAACAAC |
| | | CTGCTGCCCGAGGACAGCGCCGTGTACTACTGCAA |
| | | GGCCGACACCGCCACCAACACCGACTGGGGCCAGG |
| | | GCACCCAGGTGACCGTGAGCAGCGAGCAGAAACTG |
| | | ATCAGCGAGGAAGATCTGAATCCTGGCGGAGGCGG |
| | | AGGAAGTGGTGGCGGAGGTTCTGGTGGCGGTGGAT |
| | | CAGGCGGTGGCGGATCTGGATCTATGGATATCCAG |
| | | ATGACCCAGTCCCCGAGCTCCCTGTCCGCCTCTGT |
| | | GGGCGATAGGGTCACCATCACCTGCCGTGCCAGTC |
| | | AGGACATCCGTAATTATCTGAACTGGTATCAACAG |
| | | AAACCAGGAAAAGCTCCGAAACTACTGATTTACTA |
| | | TACCTCCCGCCTGGAGTCTGGAGTCCCTTCTCGCT |
| | | TCTCTGGTTCTGGTTCTGGGACGGATTACACTCTG |
| | | ACCATCAGCAGTCTGCAACCGGAAGACTTCGCAAC |
| | | TTATTACTGTCAGCAAGGTAATACTCTGCCGTGGA |
| | | CGTTCGGACAGGGCACCAAGGTGGAGATCAAAGGC |
| | | GGCGGCGGAAGTGGAGGAGGAGGCTCAGGCGGAGG |
| | | AGGGAGCGAGGTTCAGCTGGTGGAGTCTGGCGGTG |
| | | GCCTGGTGCAGCCAGGGGGCTCACTCCGTTTGTCC |
| | | TGTGCAGCTTCTGGCTACTCCTTTACCGGCTACAC |
| | | TATGAACTGGGTGCGTCAGGCCCCAGGTAAGGGCC |
| | | TGGAATGGGTTGCACTGATTAATCCTTATAAAGGT |
| | | GTTAGTACCTACAACCAGAAGTTCAAGGACCGTTT |
| | | CACTATAAGCGTAGATAAATCCAAAAACACAGCCT |
| | | ACCTGCAAATGAACAGCCTGCGTGCTGAGGACACT |
| | | GCCGTCTATTATTGTGCTAGAAGCGGATACTACGG |
| | | CGATAGTGACTGGTATTTTGACGTGTGGGGTCAAG |
| | | GAACCCTGGTCACCGTCTCCTCGACATCTGGCGGC |
| | | GGAGGATCTCTGGAATCTGGACAGGTGCTGCTGGA |
| | | AAGCAACATCAAGGTGCTGCCCACCTGGTCTACCC |
| | | CAGTTCAGCCTATGGCTCTGATTGTGCTTGGCGGA |
| | | GTTGCCGGCCTGCTGCTCTTTATCGGCCTGGGCAT |
| | | CTTCTTTTGCGTGCGGTGCAGACATCGGCGGAGAC |
| | | AGGCTGAGAGAATGAGCCAGATCAAGCGGCTGCTG |
| | | AGCGAGAAGAAAACCTGTCAGTGCCCTCACCGGTT |
| | | CCAGAAAACATGCAGCCCCATC |
| 661 | Nucleotide | ATGGCTCTGCCTGTGACAGCTCTGTTGCTGCCTCT |
| | | GGCTCTGCTGCTGCATGCTGCTAGACCTCAGGTGC |
| | | AGCTGGTGGAGAGCGGCGGCGGCCTGGTGCAGCCC |
| | | GGCGGCAGCCTGAGGCTGAGCTGCGCCACCAGCGG |
| | | CATCATCTTCCACATCTACACCATGGGCTGGTACA |
| | | GGGGCGCCCCCGGCAAGCAGAGGGAGCTGGTGGCC |
| | | AGGATCACCAGCGGCGGCGACACCAACTACGCCGA |
| | | CAGCGTGAAGGGCAGGTTCACCATCAGCAGGGACA |
| | | ACGTGAAGAACACCATGTACCTGCAGATGAACAGC |
| | | CTGAAGCCCGAGGACACCGCCGTGTACTACTGCAA |
| | | CAGGTTCCCCGGCGCCACCTTCAGCTGGGGCCAGG |
| | | GCACCCAGGTGACCGTGAGCAGCGAGCAGAAACTG |
| | | ATCAGCGAGGAAGATCTGAATCCTGGCGGAGGCGG |
| | | AGGAAGTGGTGGCGGAGGTTCTGGTGGCGGTGGAT |
| | | CAGGCGGTGGCGGATCTGGATCTATGGATATCCAG |
| | | ATGACCCAGTCCCCGAGCTCCCTGTCCGCCTCTGT |
| | | GGGCGATAGGGTCACCATCACCTGCCGTGCCAGTC |
| | | AGGACATCCGTAATTATCTGAACTGGTATCAACAG |
| | | AAACCAGGAAAAGCTCCGAAACTACTGATTTACTA |
| | | TACCTCCCGCCTGGAGTCTGGAGTCCCTTCTCGCT |
| | | TCTCTGGTTCTGGTTCTGGGACGGATTACACTCTG |
| | | ACCATCAGCAGTCTGCAACCGGAAGACTTCGCAAC |
| | | TTATTACTGTCAGCAAGGTAATACTCTGCCGTGGA |
| | | CGTTCGGACAGGGCACCAAGGTGGAGATCAAAGGC |
| | | GGCGGCGGAAGTGGAGGAGGAGGCTCAGGCGGAGG |
| | | AGGGAGCGAGGTTCAGCTGGTGGAGTCTGGCGGTG |
| | | GCCTGGTGCAGCCAGGGGGCTCACTCCGTTTGTCC |
| | | TGTGCAGCTTCTGGCTACTCCTTTACCGGCTACAC |
| | | TATGAACTGGGTGCGTCAGGCCCCAGGTAAGGGCC |
| | | TGGAATGGGTTGCACTGATTAATCCTTATAAAGGT |
| | | GTTAGTACCTACAACCAGAAGTTCAAGGACCGTTT |
| | | CACTATAAGCGTAGATAAATCCAAAAACACAGCCT |
| | | ACCTGCAAATGAACAGCCTGCGTGCTGAGGACACT |
| | | GCCGTCTATTATTGTGCTAGAAGCGGATACTACGG |
| | | CGATAGTGACTGGTATTTTGACGTGTGGGGTCAAG |
| | | GAACCCTGGTCACCGTCTCCTCGACATCTGGCGGC |
| | | GGAGGATCTCTGGAATCTGGACAGGTGCTGCTGGA |
| | | AAGCAACATCAAGGTGCTGCCCACCTGGTCTACCC |
| | | CAGTTCAGCCTATGGCTCTGATTGTGCTTGGCGGA |
| | | GTTGCCGGCCTGCTGCTCTTTATCGGCCTGGGCAT |
| | | CTTCTTTTGCGTGCGGTGCAGACATCGGCGGAGAC |
| | | AGGCTGAGAGAATGAGCCAGATCAAGCGGCTGCTG |
| | | AGCGAGAAGAAAACCTGTCAGTGCCCTCACCGGTT |
| | | CCAGAAAACATGCAGCCCCATC |
| 662 | Nucleotide | ATGGCTCTGCCTGTGACAGCTCTGTTGCTGCCTCT |
| | | GGCTCTGCTGCTGCATGCTGCTAGACCTCAGCTGC |
| | | AGCTGGTGGAGAGCGGCGGCGGCCTGGTGCAGGCC |
| | | GGCGGCAGCCTGAGGCTGAGCTGCGCCGTGAGCGG |
| | | CAACATCTGGGTGTTCACCGTGATGGCCTGGTACA |
| | | GGCAGGTGCCCGGCAAGCAGAGGGAGCTGGTGGCC |
| | | GCCAGCACCAACGGCGGCAGCACCAACTACGCCGA |
| | | CAGCGTGAAGGGCAGGTTCACCATCAGCAGGGACA |
| | | ACGTGAAGAACACCGTGTACCTGCAGATGAACAGC |
| | | CTGAAGCCCGAGGACACCGCCGTGTACTACTGCAA |
| | | CAGGCAGAGGACCGTGATCGGCATGAACCCCCTGG |
| | | CCCCCTGGGGCCAGGGCACCCAGGTGACCGTGAGC |
| | | AGCGAGCAGAAACTGATCAGCGAGGAAGATCTGAA |
| | | TCCTGGCGGAGGCGGAGGAAGTGGTGGCGGAGGTT |
| | | CTGGTGGCGGTGGATCAGGCGGTGGCGGATCTGGA |
| | | TCTATGGATATCCAGATGACCCAGTCCCCGAGCTC |
| | | CCTGTCCGCCTCTGTGGGCGATAGGGTCACCATCA |
| | | CCTGCCGTGCCAGTCAGGACATCCGTAATTATCTG |
| | | AACTGGTATCAACAGAAACCAGGAAAAGCTCCGAA |
| | | ACTACTGATTTACTATACCTCCCGCCTGGAGTCTG |
| | | GAGTCCCTTCTCGCTTCTCTGGTTCTGGTTCTGGG |
| | | ACGGATTACACTCTGACCATCAGCAGTCTGCAACC |
| | | GGAAGACTTCGCAACTTATTACTGTCAGCAAGGTA |
| | | ATACTCTGCCGTGGACGTTCGGACAGGGCACCAAG |
| | | GTGGAGATCAAAGGCGGCGGCGGAAGTGGAGGAGG |
| | | AGGCTCAGGCGGAGGAGGGAGCGAGGTTCAGCTGG |
| | | TGGAGTCTGGCGGTGGCCTGGTGCAGCCAGGGGGC |
| | | TCACTCCGTTTGTCCTGTGCAGCTTCTGGCTACTC |
| | | CTTTACCGGCTACACTATGAACTGGGTGCGTCAGG |
| | | CCCCAGGTAAGGGCCTGGAATGGGTTGCACTGATT |
| | | AATCCTTATAAAGGTGTTAGTACCTACAACCAGAA |
| | | GTTCAAGGACCGTTTCACTATAAGCGTAGATAAAT |
| | | CCAAAAACACAGCCTACCTGCAAATGAACAGCCTG |
| | | CGTGCTGAGGACACTGCCGTCTATTATTGTGCTAG |
| | | AAGCGGATACTACGGCGATAGTGACTGGTATTTTG |
| | | ACGTGTGGGGTCAAGGAACCCTGGTCACCGTCTCC |
| | | TCGACATCTGGCGGCGGAGGATCTCTGGAATCTGG |
| | | ACAGGTGCTGCTGGAAAGCAACATCAAGGTGCTGC |
| | | CCACCTGGTCTACCCCAGTTCAGCCTATGGCTCTG |
| | | ATTGTGCTTGGCGGAGTTGCCGGCCTGCTGCTCTT |
| | | TATCGGCCTGGGCATCTTCTTTTGCGTGCGGTGCA |
| | | GACATCGGCGGAGACAGGCTGAGAGAATGAGCCAG |
| | | ATCAAGCGGCTGCTGAGCGAGAAGAAAACCTGTCA |
| | | GTGCCCTCACCGGTTCCAGAAAACATGCAGCCCCA |
| | | TC |
| 663 | Nucleotide | ATGGCTCTGCCTGTGACAGCTCTGTTGCTGCCTCT |
| | | GGCTCTGCTGCTGCATGCTGCTAGACCTCAGGTGC |
| | | AGCTGGTGGAGAGCGGCGGCGGCCTGGTGCAGCCC |
| | | GGCGGCAGCCTGAGGCTGAGCTGCGCCGTGAGCAG |
| | | GAACATCGCCAGCCTGTACAGGGTGGACTGGTACA |
| | | GGCAGGCCCCCGGCAAGCAGAGGGAGCTGGTGGCC |
| | | GGCAGGACCAGCGGCGGCACCACCACCTACCTGGA |
| | | CGCCGTGGAGGGCAGGTTCACCATCAGCAGGGACA |
| | | ACGTGAAGGACACCGTGTACCTGCAGATGAACAGC |
| | | CTGACCCCCGAGGACACCGCCGTGTACTACTGCCA |
| | | CGCCCACGACCACTGGAGGGACAGCTGGGGCCAGG |
| | | GCACCCAGGTGACCGTGAGCAGCGAGCAGAAACTG |
| | | ATCAGCGAGGAAGATCTGAATCCTGGCGGAGGCGG |
| | | AGGAAGTGGTGGCGGAGGTTCTGGTGGCGGTGGAT |
| | | CAGGCGGTGGCGGATCTGGATCTATGGATATCCAG |
| | | ATGACCCAGTCCCCGAGCTCCCTGTCCGCCTCTGT |
| | | GGGCGATAGGGTCACCATCACCTGCCGTGCCAGTC |
| | | AGGACATCCGTAATTATCTGAACTGGTATCAACAG |
| | | AAACCAGGAAAAGCTCCGAAACTACTGATTTACTA |
| | | TACCTCCCGCCTGGAGTCTGGAGTCCCTTCTCGCT |
| | | TCTCTGGTTCTGGTTCTGGGACGGATTACACTCTG |
| | | ACCATCAGCAGTCTGCAACCGGAAGACTTCGCAAC |
| | | TTATTACTGTCAGCAAGGTAATACTCTGCCGTGGA |
| | | CGTTCGGACAGGGCACCAAGGTGGAGATCAAAGGC |
| | | GGCGGCGGAAGTGGAGGAGGAGGCTCAGGCGGAGG |
| | | AGGGAGCGAGGTTCAGCTGGTGGAGTCTGGCGGTG |
| | | GCCTGGTGCAGCCAGGGGGCTCACTCCGTTTGTCC |
| | | TGTGCAGCTTCTGGCTACTCCTTTACCGGCTACAC |
| | | TATGAACTGGGTGCGTCAGGCCCCAGGTAAGGGCC |
| | | TGGAATGGGTTGCACTGATTAATCCTTATAAAGGT |
| | | GTTAGTACCTACAACCAGAAGTTCAAGGACCGTTT |
| | | CACTATAAGCGTAGATAAATCCAAAAACACAGCCT |
| | | ACCTGCAAATGAACAGCCTGCGTGCTGAGGACACT |
| | | GCCGTCTATTATTGTGCTAGAAGCGGATACTACGG |
| | | CGATAGTGACTGGTATTTTGACGTGTGGGGTCAAG |
| | | GAACCCTGGTCACCGTCTCCTCGACATCTGGCGGC |
| | | GGAGGATCTCTGGAATCTGGACAGGTGCTGCTGGA |
| | | AAGCAACATCAAGGTGCTGCCCACCTGGTCTACCC |
| | | CAGTTCAGCCTATGGCTCTGATTGTGCTTGGCGGA |
| | | GTTGCCGGCCTGCTGCTCTTTATCGGCCTGGGCAT |
| | | CTTCTTTTGCGTGCGGTGCAGACATCGGCGGAGAC |
| | | AGGCTGAGAGAATGAGCCAGATCAAGCGGCTGCTG |
| | | AGCGAGAAGAAAACCTGTCAGTGCCCTCACCGGTT |
| | | CCAGAAAACATGCAGCCCCATC |
| 664 | Nucleotide | ATGGCTCTGCCTGTGACAGCTCTGTTGCTGCCTCT |
| | | GGCTCTGCTGCTGCATGCTGCTAGACCTGAGGTGC |
| | | AGCTGGTGGAGAGCGGCGGCGGCCTGGTGCAGCCC |
| | | GGCGGCAGCCTGAGGCTGAGCTGCGCCGCCAGCAG |
| | | GAACATCTTCAGCCTGTACAGGGTGGACTGGTACA |
| | | GGCAGGCCCCCGGCAAGCAGAGGGAGCTGGTGGCC |
| | | GGCAGCACCAGCGGCGGCACCACCACCTACGCCGA |
| | | CGCCGTGAAGGGCAGGTTCACCATCAGCACCGACA |
| | | ACGTGAAGGACACCGTGTACCTGCAGATGAACAGC |
| | | CTGACCCCCGAGGACACCGCCGTGTACTACTGCCA |
| | | CGCCCACGACCACTGGAGGGACAGCTGGGGCCAGG |
| | | GCACCCAGGTGACCGTGAGCAGCGAGCAGAAACTG |
| | | ATCAGCGAGGAAGATCTGAATCCTGGCGGAGGCGG |
| | | AGGAAGTGGTGGCGGAGGTTCTGGTGGCGGTGGAT |
| | | CAGGCGGTGGCGGATCTGGATCTATGGATATCCAG |
| | | ATGACCCAGTCCCCGAGCTCCCTGTCCGCCTCTGT |
| | | GGGCGATAGGGTCACCATCACCTGCCGTGCCAGTC |
| | | AGGACATCCGTAATTATCTGAACTGGTATCAACAG |
| | | AAACCAGGAAAAGCTCCGAAACTACTGATTTACTA |
| | | TACCTCCCGCCTGGAGTCTGGAGTCCCTTCTCGCT |
| | | TCTCTGGTTCTGGTTCTGGGACGGATTACACTCTG |
| | | ACCATCAGCAGTCTGCAACCGGAAGACTTCGCAAC |
| | | TTATTACTGTCAGCAAGGTAATACTCTGCCGTGGA |
| | | CGTTCGGACAGGGCACCAAGGTGGAGATCAAAGGC |
| | | GGCGGCGGAAGTGGAGGAGGAGGCTCAGGCGGAGG |
| | | AGGGAGCGAGGTTCAGCTGGTGGAGTCTGGCGGTG |
| | | GCCTGGTGCAGCCAGGGGGCTCACTCCGTTTGTCC |
| | | TGTGCAGCTTCTGGCTACTCCTTTACCGGCTACAC |
| | | TATGAACTGGGTGCGTCAGGCCCCAGGTAAGGGCC |
| | | TGGAATGGGTTGCACTGATTAATCCTTATAAAGGT |
| | | GTTAGTACCTACAACCAGAAGTTCAAGGACCGTTT |
| | | CACTATAAGCGTAGATAAATCCAAAAACACAGCCT |
| | | ACCTGCAAATGAACAGCCTGCGTGCTGAGGACACT |
| | | GCCGTCTATTATTGTGCTAGAAGCGGATACTACGG |
| | | CGATAGTGACTGGTATTTTGACGTGTGGGGTCAAG |
| | | GAACCCTGGTCACCGTCTCCTCGACATCTGGCGGC |
| | | GGAGGATCTCTGGAATCTGGACAGGTGCTGCTGGA |
| | | AAGCAACATCAAGGTGCTGCCCACCTGGTCTACCC |
| | | CAGTTCAGCCTATGGCTCTGATTGTGCTTGGCGGA |
| | | GTTGCCGGCCTGCTGCTCTTTATCGGCCTGGGCAT |
| | | CTTCTTTTGCGTGCGGTGCAGACATCGGCGGAGAC |
| | | AGGCTGAGAGAATGAGCCAGATCAAGCGGCTGCTG |
| | | AGCGAGAAGAAAACCTGTCAGTGCCCTCACCGGTT |
| | | CCAGAAAACATGCAGCCCCATC |
| 665 | Nucleotide | ATGGCTCTGCCTGTGACAGCTCTGTTGCTGCCTCT |
| | | GGCTCTGCTGCTGCATGCTGCTAGACCTCAGGTGC |
| | | AGCTGGTGCAGTCTGGGGCTGAGGTGAAGAAGCCT |
| | | GGGTCCTCGGTGAAGGTCTCCTGCAAGGCTTCTGG |
| | | AGGCACCTTCAGCAGCTATGCTATCAGCTGGGTGC |
| | | GACAGGCCCCTGGACAAGGGCTTGAGTGGATGGGA |
| | | GGGATCATCCCTATCTTTGGTACAGCAAACTACGC |
| | | ACAGAAGTTCCAGGGCAGAGTCACGATTACCGCGG |
| | | ACGAATCCACGAGCACAGCCTACATGGAGCTGAGC |
| | | AGCCTGAGGAGCGAGGACACGGCCGTGTATTACTG |
| | | TGCGAGAGACATATTACGATTGAGCGTGTCCTCGG |
| | | GTATGGACGTCTGGGGCCAAGGGACCCTGGTCACC |
| | | GTGTCCTCAGGGTCAACCTCTGGTAGCGGTAAGCC |
| | | TGGCTCCGGCGAAGGCTCCACAAAGGGTCAGTCTG |
| | | TGCTGACTCAGCCACCCTCAGCGTCTGGGACCCCC |
| | | GGGCAGAGGGTCACCATCTCTTGTTCTGGAAGCAG |
| | | CTCCAACATCGGAAGTAATTATGTATACTGGTACC |
| | | AGCAGCTCCCAGGAACGGCCCCCAAACTCCTCATC |
| | | TATAGGAATAATCAGCGGCCCTCAGGGGTCCCTGA |
| | | CCGACTCTCTGGCTCCAAGTCTGGCACCTCAGCCT |
| | | CCCTGGCCATCAGTGGGCTCCGGTCCGAGGATGAG |
| | | GCTGATTATTACTGTGCAGCATGGGATGACAGCCT |
| | | GAGTGCTGTGGTATTCGGCGGAGGGACCAAGCTGA |
| | | CCGTCCTAGAGCAGAAACTGATCAGCGAGGAAGAT |
| | | CTGAATCCTGGCGGAGGCGGAGGAAGTGGTGGCGG |
| | | AGGTTCTGGTGGCGGTGGATCAGGCGGTGGCGGAT |
| | | CTGGATCTATGGATATCCAGATGACCCAGTCCCCG |
| | | AGCTCCCTGTCCGCCTCTGTGGGCGATAGGGTCAC |
| | | CATCACCTGCCGTGCCAGTCAGGACATCCGTAATT |
| | | ATCTGAACTGGTATCAACAGAAACCAGGAAAAGCT |
| | | CCGAAACTACTGATTTACTATACCTCCCGCCTGGA |
| | | GTCTGGAGTCCCTTCTCGCTTCTCTGGTTCTGGTT |
| | | CTGGGACGGATTACACTCTGACCATCAGCAGTCTG |
| | | CAACCGGAAGACTTCGCAACTTATTACTGTCAGCA |
| | | AGGTAATACTCTGCCGTGGACGTTCGGACAGGGCA |
| | | CCAAGGTGGAGATCAAAGGCGGCGGCGGAAGTGGA |
| | | GGAGGAGGCTCAGGCGGAGGAGGGAGCGAGGTTCA |
| | | GCTGGTGGAGTCTGGCGGTGGCCTGGTGCAGCCAG |
| | | GGGGCTCACTCCGTTTGTCCTGTGCAGCTTCTGGC |
| | | TACTCCTTTACCGGCTACACTATGAACTGGGTGCG |
| | | TCAGGCCCCAGGTAAGGGCCTGGAATGGGTTGCAC |
| | | TGATTAATCCTTATAAAGGTGTTAGTACCTACAAC |
| | | CAGAAGTTCAAGGACCGTTTCACTATAAGCGTAGA |
| | | TAAATCCAAAAACACAGCCTACCTGCAAATGAACA |
| | | GCCTGCGTGCTGAGGACACTGCCGTCTATTATTGT |
| | | GCTAGAAGCGGATACTACGGCGATAGTGACTGGTA |
| | | TTTTGACGTGTGGGGTCAAGGAACCCTGGTCACCG |
| | | TCTCCTCGACATCTGGCGGCGGAGGATCTCTGGAA |
| | | TCTGGACAGGTGCTGCTGGAAAGCAACATCAAGGT |
| | | GCTGCCCACCTGGTCTACCCCAGTTCAGCCTATGG |
| | | CTCTGATTGTGCTTGGCGGAGTTGCCGGCCTGCTG |
| | | CTCTTTATCGGCCTGGGCATCTTCTTTTGCGTGCG |
| | | GTGCAGACATCGGCGGAGACAGGCTGAGAGAATGA |
| | | GCCAGATCAAGCGGCTGCTGAGCGAGAAGAAAACC |
| | | TGTCAGTGCCCTCACCGGTTCCAGAAAACATGCAG |
| | | CCCCATC |
| 666 | Nucleotide | ATGGCTCTGCCTGTGACAGCTCTGTTGCTGCCTCT |
| | | GGCTCTGCTGCTGCATGCTGCTAGACCTCAGTCTG |
| | | TGCTGACTCAGCCACCCTCAGCGTCTGGGACCCCC |
| | | GGGCAGAGGGTCACCATCTCTTGTTCTGGAAGCAG |
| | | CTCCAACATCGGAAGTAATTATGTATACTGGTACC |
| | | AGCAGCTCCCAGGAACGGCCCCCAAACTCCTCATC |
| | | TATAGGAATAATCAGCGGCCCTCAGGGGTCCCTGA |
| | | CCGACTCTCTGGCTCCAAGTCTGGCACCTCAGCCT |
| | | CCCTGGCCATCAGTGGGCTCCGGTCCGAGGATGAG |
| | | GCTGATTATTACTGTGCAGCATGGGATGACAGCCT |
| | | GAGTGCTGTGGTATTCGGCGGAGGGACCAAGCTGA |
| | | CCGTCCTAGGGTCAACCTCTGGTAGCGGTAAGCCT |
| | | GGCTCCGGCGAAGGCTCCACAAAGGGTCAGGTGCA |
| | | GCTGGTGCAGTCTGGGGCTGAGGTGAAGAAGCCTG |
| | | GGTCCTCGGTGAAGGTCTCCTGCAAGGCTTCTGGA |
| | | GGCACCTTCAGCAGCTATGCTATCAGCTGGGTGCG |
| | | ACAGGCCCCTGGACAAGGGCTTGAGTGGATGGGAG |
| | | GGATCATCCCTATCTTTGGTACAGCAAACTACGCA |
| | | CAGAAGTTCCAGGGCAGAGTCACGATTACCGCGGA |
| | | CGAATCCACGAGCACAGCCTACATGGAGCTGAGCA |
| | | GCCTGAGGAGCGAGGACACGGCCGTGTATTACTGT |
| | | GCGAGAGACATATTACGATTGAGCGTGTCCTCGGG |
| | | TATGGACGTCTGGGGCCAAGGGACCCTGGTCACCG |
| | | TGTCCTCAGAGCAGAAACTGATCAGCGAGGAAGAT |
| | | CTGAATCCTGGCGGAGGCGGAGGAAGTGGTGGCGG |
| | | AGGTTCTGGTGGCGGTGGATCAGGCGGTGGCGGAT |
| | | CTGGATCTATGGATATCCAGATGACCCAGTCCCCG |
| | | AGCTCCCTGTCCGCCTCTGTGGGCGATAGGGTCAC |
| | | CATCACCTGCCGTGCCAGTCAGGACATCCGTAATT |
| | | ATCTGAACTGGTATCAACAGAAACCAGGAAAAGCT |
| | | CCGAAACTACTGATTTACTATACCTCCCGCCTGGA |
| | | GTCTGGAGTCCCTTCTCGCTTCTCTGGTTCTGGTT |
| | | CTGGGACGGATTACACTCTGACCATCAGCAGTCTG |
| | | CAACCGGAAGACTTCGCAACTTATTACTGTCAGCA |
| | | AGGTAATACTCTGCCGTGGACGTTCGGACAGGGCA |
| | | CCAAGGTGGAGATCAAAGGCGGCGGCGGAAGTGGA |
| | | GGAGGAGGCTCAGGCGGAGGAGGGAGCGAGGTTCA |
| | | GCTGGTGGAGTCTGGCGGTGGCCTGGTGCAGCCAG |
| | | GGGGCTCACTCCGTTTGTCCTGTGCAGCTTCTGGC |
| | | TACTCCTTTACCGGCTACACTATGAACTGGGTGCG |
| | | TCAGGCCCCAGGTAAGGGCCTGGAATGGGTTGCAC |
| | | TGATTAATCCTTATAAAGGTGTTAGTACCTACAAC |
| | | CAGAAGTTCAAGGACCGTTTCACTATAAGCGTAGA |
| | | TAAATCCAAAAACACAGCCTACCTGCAAATGAACA |
| | | GCCTGCGTGCTGAGGACACTGCCGTCTATTATTGT |
| | | GCTAGAAGCGGATACTACGGCGATAGTGACTGGTA |
| | | TTTTGACGTGTGGGGTCAAGGAACCCTGGTCACCG |
| | | TCTCCTCGACATCTGGCGGCGGAGGATCTCTGGAA |
| | | TCTGGACAGGTGCTGCTGGAAAGCAACATCAAGGT |
| | | GCTGCCCACCTGGTCTACCCCAGTTCAGCCTATGG |
| | | CTCTGATTGTGCTTGGCGGAGTTGCCGGCCTGCTG |
| | | CTCTTTATCGGCCTGGGCATCTTCTTTTGCGTGCG |
| | | GTGCAGACATCGGCGGAGACAGGCTGAGAGAATGA |
| | | GCCAGATCAAGCGGCTGCTGAGCGAGAAGAAAACC |
| | | TGTCAGTGCCCTCACCGGTTCCAGAAAACATGCAG |
| | | CCCCATC |
| 667 | Nucleotide | ATGGCTCTGCCTGTGACAGCTCTGTTGCTGCCTCT |
| | | GGCTCTGCTGCTGCATGCTGCTAGACCTCAGGTGC |
| | | AGCTGCAGGAGTCGGGGGGAGGCGTGGTCCAGCCT |
| | | GGGAGGTCCCTGAGACTCTCCTGTGCAGCCTCTGG |
| | | ATTCACCCTCAGTAGCTATGGCATGCACTGGGTCC |
| | | GCCAGGCTCCAGGCAAGGGGCTGGAGTGGGTGGCA |
| | | GTTATATCATATGATGGAAGTAATAAATACTATGC |
| | | AGACTCCGTGAAGGGCCGATTCACCATCTCCAGAG |
| | | ACAATTCCAAGAACACGCTGTATCTGCAAATGAAC |
| | | AGCCTGAGAGCTGAGGACACGGCTGTGTATTACTG |
| | | TGCGAAGAGCGGCTGGAGATATTACTACTACTACG |
| | | GTATGGACGTCTGGGGCCAAGGGACCCTGGTCACC |
| | | GTGTCCTCAGGGTCAACCTCTGGTAGCGGTAAGCC |
| | | TGGCTCCGGCGAAGGCTCCACAAAGGGTCAGTCTG |
| | | TGTTGACGCAGCCGCCCTCAGTGTCTGGGGCCCCA |
| | | GGGCAGAGGGTCACCATCTCCTGCACTGGGAGCAG |
| | | CTCCAACATCGGGGCAGGTTATGATGTACACTGGT |
| | | ACCAGCAGCTTCCAGGAACAGCCCCCAAACTCCTC |
| | | ATCTATGGTAACAGCAATCGGCCCTCAGGGGTCCC |
| | | TGACCGATTCTCTGGCTCCAAGTCTGGCACCTCAG |
| | | CCTCCCTGGCCATCACTGGGCTCCAGGCTGAGGAT |
| | | GAGGCTGATTATTACTGCCAGTCCTATGACAGCAG |
| | | CCTGAGTGGTTCGGTATTCGGCGGAGGGACCAAGC |
| | | TGACCGTCCTAGAGCAGAAACTGATCAGCGAGGAA |
| | | GATCTGAATCCTGGCGGAGGCGGAGGAAGTGGTGG |
| | | CGGAGGTTCTGGTGGCGGTGGATCAGGCGGTGGCG |
| | | GATCTGGATCTATGGATATCCAGATGACCCAGTCC |
| | | CCGAGCTCCCTGTCCGCCTCTGTGGGCGATAGGGT |
| | | CACCATCACCTGCCGTGCCAGTCAGGACATCCGTA |
| | | ATTATCTGAACTGGTATCAACAGAAACCAGGAAAA |
| | | GCTCCGAAACTACTGATTTACTATACCTCCCGCCT |
| | | GGAGTCTGGAGTCCCTTCTCGCTTCTCTGGTTCTG |
| | | GTTCTGGGACGGATTACACTCTGACCATCAGCAGT |
| | | CTGCAACCGGAAGACTTCGCAACTTATTACTGTCA |
| | | GCAAGGTAATACTCTGCCGTGGACGTTCGGACAGG |
| | | GCACCAAGGTGGAGATCAAAGGCGGCGGCGGAAGT |
| | | GGAGGAGGAGGCTCAGGCGGAGGAGGGAGCGAGGT |
| | | TCAGCTGGTGGAGTCTGGCGGTGGCCTGGTGCAGC |
| | | CAGGGGGCTCACTCCGTTTGTCCTGTGCAGCTTCT |
| | | GGCTACTCCTTTACCGGCTACACTATGAACTGGGT |
| | | GCGTCAGGCCCCAGGTAAGGGCCTGGAATGGGTTG |
| | | CACTGATTAATCCTTATAAAGGTGTTAGTACCTAC |
| | | AACCAGAAGTTCAAGGACCGTTTCACTATAAGCGT |
| | | AGATAAATCCAAAAACACAGCCTACCTGCAAATGA |
| | | ACAGCCTGCGTGCTGAGGACACTGCCGTCTATTAT |
| | | TGTGCTAGAAGCGGATACTACGGCGATAGTGACTG |
| | | GTATTTTGACGTGTGGGGTCAAGGAACCCTGGTCA |
| | | CCGTCTCCTCGACATCTGGCGGCGGAGGATCTCTG |
| | | GAATCTGGACAGGTGCTGCTGGAAAGCAACATCAA |
| | | GGTGCTGCCCACCTGGTCTACCCCAGTTCAGCCTA |
| | | TGGCTCTGATTGTGCTTGGCGGAGTTGCCGGCCTG |
| | | CTGCTCTTTATCGGCCTGGGCATCTTCTTTTGCGT |
| | | GCGGTGCAGACATCGGCGGAGACAGGCTGAGAGAA |
| | | TGAGCCAGATCAAGCGGCTGCTGAGCGAGAAGAAA |
| | | ACCTGTCAGTGCCCTCACCGGTTCCAGAAAACATG |
| | | CAGCCCCATC |
| 668 | Nucleotide | ATGGCTCTGCCTGTGACAGCTCTGTTGCTGCCTCT |
| | | GGCTCTGCTGCTGCATGCTGCTAGACCTCAGTCTG |
| | | TGTTGACGCAGCCGCCCTCAGTGTCTGGGGCCCCA |
| | | GGGCAGAGGGTCACCATCTCCTGCACTGGGAGCAG |
| | | CTCCAACATCGGGGCAGGTTATGATGTACACTGGT |
| | | ACCAGCAGCTTCCAGGAACAGCCCCCAAACTCCTC |
| | | ATCTATGGTAACAGCAATCGGCCCTCAGGGGTCCC |
| | | TGACCGATTCTCTGGCTCCAAGTCTGGCACCTCAG |
| | | CCTCCCTGGCCATCACTGGGCTCCAGGCTGAGGAT |
| | | GAGGCTGATTATTACTGCCAGTCCTATGACAGCAG |
| | | CCTGAGTGGTTCGGTATTCGGCGGAGGGACCAAGC |
| | | TGACCGTCCTAGGGTCAACCTCTGGTAGCGGTAAG |
| | | CCTGGCTCCGGCGAAGGCTCCACAAAGGGTCAGGT |
| | | GCAGCTGCAGGAGTCGGGGGGAGGCGTGGTCCAGC |
| | | CTGGGAGGTCCCTGAGACTCTCCTGTGCAGCCTCT |
| | | GGATTCACCCTCAGTAGCTATGGCATGCACTGGGT |
| | | CCGCCAGGCTCCAGGCAAGGGGCTGGAGTGGGTGG |
| | | CAGTTATATCATATGATGGAAGTAATAAATACTAT |
| | | GCAGACTCCGTGAAGGGCCGATTCACCATCTCCAG |
| | | AGACAATTCCAAGAACACGCTGTATCTGCAAATGA |
| | | ACAGCCTGAGAGCTGAGGACACGGCTGTGTATTAC |
| | | TGTGCGAAGAGCGGCTGGAGATATTACTACTACTA |
| | | CGGTATGGACGTCTGGGGCCAAGGGACCCTGGTCA |
| | | CCGTGTCCTCAGAGCAGAAACTGATCAGCGAGGAA |
| | | GATCTGAATCCTGGCGGAGGCGGAGGAAGTGGTGG |
| | | CGGAGGTTCTGGTGGCGGTGGATCAGGCGGTGGCG |
| | | GATCTGGATCTATGGATATCCAGATGACCCAGTCC |
| | | CCGAGCTCCCTGTCCGCCTCTGTGGGCGATAGGGT |
| | | CACCATCACCTGCCGTGCCAGTCAGGACATCCGTA |
| | | ATTATCTGAACTGGTATCAACAGAAACCAGGAAAA |
| | | GCTCCGAAACTACTGATTTACTATACCTCCCGCCT |
| | | GGAGTCTGGAGTCCCTTCTCGCTTCTCTGGTTCTG |
| | | GTTCTGGGACGGATTACACTCTGACCATCAGCAGT |
| | | CTGCAACCGGAAGACTTCGCAACTTATTACTGTCA |
| | | GCAAGGTAATACTCTGCCGTGGACGTTCGGACAGG |
| | | GCACCAAGGTGGAGATCAAAGGCGGCGGCGGAAGT |
| | | GGAGGAGGAGGCTCAGGCGGAGGAGGGAGCGAGGT |
| | | TCAGCTGGTGGAGTCTGGCGGTGGCCTGGTGCAGC |
| | | CAGGGGGCTCACTCCGTTTGTCCTGTGCAGCTTCT |
| | | GGCTACTCCTTTACCGGCTACACTATGAACTGGGT |
| | | GCGTCAGGCCCCAGGTAAGGGCCTGGAATGGGTTG |
| | | CACTGATTAATCCTTATAAAGGTGTTAGTACCTAC |
| | | AACCAGAAGTTCAAGGACCGTTTCACTATAAGCGT |
| | | AGATAAATCCAAAAACACAGCCTACCTGCAAATGA |
| | | ACAGCCTGCGTGCTGAGGACACTGCCGTCTATTAT |
| | | TGTGCTAGAAGCGGATACTACGGCGATAGTGACTG |
| | | GTATTTTGACGTGTGGGGTCAAGGAACCCTGGTCA |
| | | CCGTCTCCTCGACATCTGGCGGCGGAGGATCTCTG |
| | | GAATCTGGACAGGTGCTGCTGGAAAGCAACATCAA |
| | | GGTGCTGCCCACCTGGTCTACCCCAGTTCAGCCTA |
| | | TGGCTCTGATTGTGCTTGGCGGAGTTGCCGGCCTG |
| | | CTGCTCTTTATCGGCCTGGGCATCTTCTTTTGCGT |
| | | GCGGTGCAGACATCGGCGGAGACAGGCTGAGAGAA |
| | | TGAGCCAGATCAAGCGGCTGCTGAGCGAGAAGAAA |
| | | ACCTGTCAGTGCCCTCACCGGTTCCAGAAAACATG |
| | | CAGCCCCATC |
| 669 | Nucleotide | ATGGCTCTGCCTGTGACAGCTCTGTTGCTGCCTCT |
| | | GGCTCTGCTGCTGCATGCTGCTAGACCTGAGGTGC |
| | | AGCTGTTGGAGTCTGGGGGAGGCTTGGTCCAGCCT |
| | | GGGGGGTCCCTGAGACTCTCCTGTGCAGCCTCTGG |
| | | ATTCACCTTTAGTAGCTATTGGATGAGCTGGGTCC |
| | | GCCAGGCTCCAGGGAAGGGGCTGGAGTGGGTGGCC |
| | | AACATAAAGCAAGATGGAAGTGAGAAATACTATGT |
| | | GGACTCTGTGAAGGGCCGATTCACCATCTCCAGAG |
| | | ACAACGCCAAGAACTCACTGTATCTGCAAATGAAC |
| | | AGCCTGAGAGCCGAGGACACGGCTGTGTATTACTG |
| | | TGCGAGACCGGCGGGCCAGCTGCTCTACGGTATGG |
| | | ACGTCTGGGGCCAAGGGACCCTGGTCACCGTGTCC |
| | | TCAGGGTCAACCTCTGGTAGCGGTAAGCCTGGCTC |
| | | CGGCGAAGGCTCCACAAAGGGTTCCTATGTGCTGA |
| | | CTCAGCCACCCTCGGTGTCAGTGTCCCCAGGACAG |
| | | ACGGCCAGGATCACCTGCTCTGGAGATGCATTGCC |
| | | AAAGCAATATGCTTATTGGTACCAGCAGAAGCCAG |
| | | GCCAGGCCCCTGTGCTGGTGATATATAAAGACAGT |
| | | GAGAGGCCCTCAGGGATCCCTGAGCGATTCTCTGG |
| | | CTCCAGCTCAGGGACAACAGTCACGTTGACCATCA |
| | | GTGGAGTCCAGGCAGAAGACGAGGCTGACTATTAC |
| | | TGTCAATCAGCAGACAGCAGTGGTACTTGGGTGTT |
| | | CGGCGGAGGCACCAAGCTGACCGTCCTCGAGCAGA |
| | | AACTGATCAGCGAGGAAGATCTGAATCCTGGCGGA |
| | | GGCGGAGGAAGTGGTGGCGGAGGTTCTGGTGGCGG |
| | | TGGATCAGGCGGTGGCGGATCTGGATCTATGGATA |
| | | TCCAGATGACCCAGTCCCCGAGCTCCCTGTCCGCC |
| | | TCTGTGGGCGATAGGGTCACCATCACCTGCCGTGC |
| | | CAGTCAGGACATCCGTAATTATCTGAACTGGTATC |
| | | AACAGAAACCAGGAAAAGCTCCGAAACTACTGATT |
| | | TACTATACCTCCCGCCTGGAGTCTGGAGTCCCTTC |
| | | TCGCTTCTCTGGTTCTGGTTCTGGGACGGATTACA |
| | | CTCTGACCATCAGCAGTCTGCAACCGGAAGACTTC |
| | | GCAACTTATTACTGTCAGCAAGGTAATACTCTGCC |
| | | GTGGACGTTCGGACAGGGCACCAAGGTGGAGATCA |
| | | AAGGCGGCGGCGGAAGTGGAGGAGGAGGCTCAGGC |
| | | GGAGGAGGGAGCGAGGTTCAGCTGGTGGAGTCTGG |
| | | CGGTGGCCTGGTGCAGCCAGGGGGCTCACTCCGTT |
| | | TGTCCTGTGCAGCTTCTGGCTACTCCTTTACCGGC |
| | | TACACTATGAACTGGGTGCGTCAGGCCCCAGGTAA |
| | | GGGCCTGGAATGGGTTGCACTGATTAATCCTTATA |
| | | AAGGTGTTAGTACCTACAACCAGAAGTTCAAGGAC |
| | | CGTTTCACTATAAGCGTAGATAAATCCAAAAACAC |
| | | AGCCTACCTGCAAATGAACAGCCTGCGTGCTGAGG |
| | | ACACTGCCGTCTATTATTGTGCTAGAAGCGGATAC |
| | | TACGGCGATAGTGACTGGTATTTTGACGTGTGGGG |
| | | TCAAGGAACCCTGGTCACCGTCTCCTCGACATCTG |
| | | GCGGCGGAGGATCTCTGGAATCTGGACAGGTGCTG |
| | | CTGGAAAGCAACATCAAGGTGCTGCCCACCTGGTC |
| | | TACCCCAGTTCAGCCTATGGCTCTGATTGTGCTTG |
| | | GCGGAGTTGCCGGCCTGCTGCTCTTTATCGGCCTG |
| | | GGCATCTTCTTTTGCGTGCGGTGCAGACATCGGCG |
| | | GAGACAGGCTGAGAGAATGAGCCAGATCAAGCGGC |
| | | TGCTGAGCGAGAAGAAAACCTGTCAGTGCCCTCAC |
| | | CGGTTCCAGAAAACATGCAGCCCCATC |
| 670 | Nucleotide | ATGGCTCTGCCTGTGACAGCTCTGTTGCTGCCTCT |
| | | GGCTCTGCTGCTGCATGCTGCTAGACCTTCCTATG |
| | | TGCTGACTCAGCCACCCTCGGTGTCAGTGTCCCCA |
| | | GGACAGACGGCCAGGATCACCTGCTCTGGAGATGC |
| | | ATTGCCAAAGCAATATGCTTATTGGTACCAGCAGA |
| | | AGCCAGGCCAGGCCCCTGTGCTGGTGATATATAAA |
| | | GACAGTGAGAGGCCCTCAGGGATCCCTGAGCGATT |
| | | CTCTGGCTCCAGCTCAGGGACAACAGTCACGTTGA |
| | | CCATCAGTGGAGTCCAGGCAGAAGACGAGGCTGAC |
| | | TATTACTGTCAATCAGCAGACAGCAGTGGTACTTG |
| | | GGTGTTCGGCGGAGGCACCAAGCTGACCGTCCTCG |
| | | GGTCAACCTCTGGTAGCGGTAAGCCTGGCTCCGGC |
| | | GAAGGCTCCACAAAGGGTGAGGTGCAGCTGTTGGA |
| | | GTCTGGGGGAGGCTTGGTCCAGCCTGGGGGGTCCC |
| | | TGAGACTCTCCTGTGCAGCCTCTGGATTCACCTTT |
| | | AGTAGCTATTGGATGAGCTGGGTCCGCCAGGCTCC |
| | | AGGGAAGGGGCTGGAGTGGGTGGCCAACATAAAGC |
| | | AAGATGGAAGTGAGAAATACTATGTGGACTCTGTG |
| | | AAGGGCCGATTCACCATCTCCAGAGACAACGCCAA |
| | | GAACTCACTGTATCTGCAAATGAACAGCCTGAGAG |
| | | CCGAGGACACGGCTGTGTATTACTGTGCGAGACCG |
| | | GCGGGCCAGCTGCTCTACGGTATGGACGTCTGGGG |
| | | CCAAGGGACCCTGGTCACCGTGTCCTCAGAGCAGA |
| | | AACTGATCAGCGAGGAAGATCTGAATCCTGGCGGA |
| | | GGCGGAGGAAGTGGTGGCGGAGGTTCTGGTGGCGG |
| | | TGGATCAGGCGGTGGCGGATCTGGATCTATGGATA |
| | | TCCAGATGACCCAGTCCCCGAGCTCCCTGTCCGCC |
| | | TCTGTGGGCGATAGGGTCACCATCACCTGCCGTGC |
| | | CAGTCAGGACATCCGTAATTATCTGAACTGGTATC |
| | | AACAGAAACCAGGAAAAGCTCCGAAACTACTGATT |
| | | TACTATACCTCCCGCCTGGAGTCTGGAGTCCCTTC |
| | | TCGCTTCTCTGGTTCTGGTTCTGGGACGGATTACA |
| | | CTCTGACCATCAGCAGTCTGCAACCGGAAGACTTC |
| | | GCAACTTATTACTGTCAGCAAGGTAATACTCTGCC |
| | | GTGGACGTTCGGACAGGGCACCAAGGTGGAGATCA |
| | | AAGGCGGCGGCGGAAGTGGAGGAGGAGGCTCAGGC |
| | | GGAGGAGGGAGCGAGGTTCAGCTGGTGGAGTCTGG |
| | | CGGTGGCCTGGTGCAGCCAGGGGGCTCACTCCGTT |
| | | TGTCCTGTGCAGCTTCTGGCTACTCCTTTACCGGC |
| | | TACACTATGAACTGGGTGCGTCAGGCCCCAGGTAA |
| | | GGGCCTGGAATGGGTTGCACTGATTAATCCTTATA |
| | | AAGGTGTTAGTACCTACAACCAGAAGTTCAAGGAC |
| | | CGTTTCACTATAAGCGTAGATAAATCCAAAAACAC |
| | | AGCCTACCTGCAAATGAACAGCCTGCGTGCTGAGG |
| | | ACACTGCCGTCTATTATTGTGCTAGAAGCGGATAC |
| | | TACGGCGATAGTGACTGGTATTTTGACGTGTGGGG |
| | | TCAAGGAACCCTGGTCACCGTCTCCTCGACATCTG |
| | | GCGGCGGAGGATCTCTGGAATCTGGACAGGTGCTG |
| | | CTGGAAAGCAACATCAAGGTGCTGCCCACCTGGTC |
| | | TACCCCAGTTCAGCCTATGGCTCTGATTGTGCTTG |
| | | GCGGAGTTGCCGGCCTGCTGCTCTTTATCGGCCTG |
| | | GGCATCTTCTTTTGCGTGCGGTGCAGACATCGGCG |
| | | GAGACAGGCTGAGAGAATGAGCCAGATCAAGCGGC |
| | | TGCTGAGCGAGAAGAAAACCTGTCAGTGCCCTCAC |
| | | CGGTTCCAGAAAACATGCAGCCCCATC |
| 671 | Nucleotide | ATGGCTCTGCCTGTGACAGCTCTGTTGCTGCCTCT |
| | | GGCTCTGCTGCTGCATGCTGCTAGACCTGAGGTGC |
| | | AGCTGTTGGAGTCTGGGGGAGGCGTGGTCCAGCCT |
| | | GGGAGGTCCCTGAGACTCTCCTGTGCAGCCTCTGG |
| | | ATTCACCTTCAGTAGCTATGGCATGCACTGGGTCC |
| | | GCCAGGCTCCAGGCAAGGGGCTGGAGTGGGTGGCA |
| | | GTTATATCATATGATGGAAGTAATAAATACTATGC |
| | | AGACTCCGTGAAGGGCCGATTCACCATCTCCAGAG |
| | | ACAATTCCAAGAACACGCTGTATCTGCAAATGAAC |
| | | AGCCTGAGAGCTGAGGACACGGCTGTGTATTACTG |
| | | TGCGAAAGATGCCGCGGATATGGGGGCCTTTGACT |
| | | ACTGGGGCCAGGGAACCCTGGTCACCGTGTCCTCA |
| | | GGGTCAACCTCTGGTAGCGGTAAGCCTGGCTCCGG |
| | | CGAAGGCTCCACAAAGGGTGACATCCAGATGACCC |
| | | AGTCTCCAGACTCCCTGGCTGTGTCTCTGGGCGAG |
| | | AGGGCCACCATGAACTGCAAGTCCAGCCAGAGTGT |
| | | TTTATACAGCTCCAACAATAAGAACTACTTAGCTT |
| | | GGTACCAGCAGAAACCAGGACAGCCTCCTAAGCTG |
| | | CTCATTTACTGGGCATCTGCCCGGGAATCTGGGGT |
| | | CCCTGACCGATTCAGTGGCAGCGGGTCTGGGACAG |
| | | ATTTCACTCTCACCATCAGCAGCCTGCAGGCTGAA |
| | | GATGTGGCAGTTTATTACTGTCAGCAATATTATAG |
| | | TACTCCTCTCACTTTTGGCCAGGGGACCAAGGTGG |
| | | AAATCAAAGAGCAGAAACTGATCAGCGAGGAAGAT |
| | | CTGAATCCTGGCGGAGGCGGAGGAAGTGGTGGCGG |
| | | AGGTTCTGGTGGCGGTGGATCAGGCGGTGGCGGAT |
| | | CTGGATCTATGGATATCCAGATGACCCAGTCCCCG |
| | | AGCTCCCTGTCCGCCTCTGTGGGCGATAGGGTCAC |
| | | CATCACCTGCCGTGCCAGTCAGGACATCCGTAATT |
| | | ATCTGAACTGGTATCAACAGAAACCAGGAAAAGCT |
| | | CCGAAACTACTGATTTACTATACCTCCCGCCTGGA |
| | | GTCTGGAGTCCCTTCTCGCTTCTCTGGTTCTGGTT |
| | | CTGGGACGGATTACACTCTGACCATCAGCAGTCTG |
| | | CAACCGGAAGACTTCGCAACTTATTACTGTCAGCA |
| | | AGGTAATACTCTGCCGTGGACGTTCGGACAGGGCA |
| | | CCAAGGTGGAGATCAAAGGCGGCGGCGGAAGTGGA |
| | | GGAGGAGGCTCAGGCGGAGGAGGGAGCGAGGTTCA |
| | | GCTGGTGGAGTCTGGCGGTGGCCTGGTGCAGCCAG |
| | | GGGGCTCACTCCGTTTGTCCTGTGCAGCTTCTGGC |
| | | TACTCCTTTACCGGCTACACTATGAACTGGGTGCG |
| | | TCAGGCCCCAGGTAAGGGCCTGGAATGGGTTGCAC |
| | | TGATTAATCCTTATAAAGGTGTTAGTACCTACAAC |
| | | CAGAAGTTCAAGGACCGTTTCACTATAAGCGTAGA |
| | | TAAATCCAAAAACACAGCCTACCTGCAAATGAACA |
| | | GCCTGCGTGCTGAGGACACTGCCGTCTATTATTGT |
| | | GCTAGAAGCGGATACTACGGCGATAGTGACTGGTA |
| | | TTTTGACGTGTGGGGTCAAGGAACCCTGGTCACCG |
| | | TCTCCTCGACATCTGGCGGCGGAGGATCTCTGGAA |
| | | TCTGGACAGGTGCTGCTGGAAAGCAACATCAAGGT |
| | | GCTGCCCACCTGGTCTACCCCAGTTCAGCCTATGG |
| | | CTCTGATTGTGCTTGGCGGAGTTGCCGGCCTGCTG |
| | | CTCTTTATCGGCCTGGGCATCTTCTTTTGCGTGCG |
| | | GTGCAGACATCGGCGGAGACAGGCTGAGAGAATGA |
| | | GCCAGATCAAGCGGCTGCTGAGCGAGAAGAAAACC |
| | | TGTCAGTGCCCTCACCGGTTCCAGAAAACATGCAG |
| | | CCCCATC |
| 672 | Nucleotide | ATGGCTCTGCCTGTGACAGCTCTGTTGCTGCCTCT |
| | | GGCTCTGCTGCTGCATGCTGCTAGACCTGACATCC |
| | | AGATGACCCAGTCTCCAGACTCCCTGGCTGTGTCT |
| | | CTGGGCGAGAGGGCCACCATGAACTGCAAGTCCAG |
| | | CCAGAGTGTTTTATACAGCTCCAACAATAAGAACT |
| | | ACTTAGCTTGGTACCAGCAGAAACCAGGACAGCCT |
| | | CCTAAGCTGCTCATTTACTGGGCATCTGCCCGGGA |
| | | ATCTGGGGTCCCTGACCGATTCAGTGGCAGCGGGT |
| | | CTGGGACAGATTTCACTCTCACCATCAGCAGCCTG |
| | | CAGGCTGAAGATGTGGCAGTTTATTACTGTCAGCA |
| | | ATATTATAGTACTCCTCTCACTTTTGGCCAGGGGA |
| | | CCAAGGTGGAAATCAAAGGGTCAACCTCTGGTAGC |
| | | GGTAAGCCTGGCTCCGGCGAAGGCTCCACAAAGGG |
| | | TGAGGTGCAGCTGTTGGAGTCTGGGGGAGGCGTGG |
| | | TCCAGCCTGGGAGGTCCCTGAGACTCTCCTGTGCA |
| | | GCCTCTGGATTCACCTTCAGTAGCTATGGCATGCA |
| | | CTGGGTCCGCCAGGCTCCAGGCAAGGGGCTGGAGT |
| | | GGGTGGCAGTTATATCATATGATGGAAGTAATAAA |
| | | TACTATGCAGACTCCGTGAAGGGCCGATTCACCAT |
| | | CTCCAGAGACAATTCCAAGAACACGCTGTATCTGC |
| | | AAATGAACAGCCTGAGAGCTGAGGACACGGCTGTG |
| | | TATTACTGTGCGAAAGATGCCGCGGATATGGGGGC |
| | | CTTTGACTACTGGGGCCAGGGAACCCTGGTCACCG |
| | | TGTCCTCAGAGCAGAAACTGATCAGCGAGGAAGAT |
| | | CTGAATCCTGGCGGAGGCGGAGGAAGTGGTGGCGG |
| | | AGGTTCTGGTGGCGGTGGATCAGGCGGTGGCGGAT |
| | | CTGGATCTATGGATATCCAGATGACCCAGTCCCCG |
| | | AGCTCCCTGTCCGCCTCTGTGGGCGATAGGGTCAC |
| | | CATCACCTGCCGTGCCAGTCAGGACATCCGTAATT |
| | | ATCTGAACTGGTATCAACAGAAACCAGGAAAAGCT |
| | | CCGAAACTACTGATTTACTATACCTCCCGCCTGGA |
| | | GTCTGGAGTCCCTTCTCGCTTCTCTGGTTCTGGTT |
| | | CTGGGACGGATTACACTCTGACCATCAGCAGTCTG |
| | | CAACCGGAAGACTTCGCAACTTATTACTGTCAGCA |
| | | AGGTAATACTCTGCCGTGGACGTTCGGACAGGGCA |
| | | CCAAGGTGGAGATCAAAGGCGGCGGCGGAAGTGGA |
| | | GGAGGAGGCTCAGGCGGAGGAGGGAGCGAGGTTCA |
| | | GCTGGTGGAGTCTGGCGGTGGCCTGGTGCAGCCAG |
| | | GGGGCTCACTCCGTTTGTCCTGTGCAGCTTCTGGC |
| | | TACTCCTTTACCGGCTACACTATGAACTGGGTGCG |
| | | TCAGGCCCCAGGTAAGGGCCTGGAATGGGTTGCAC |
| | | TGATTAATCCTTATAAAGGTGTTAGTACCTACAAC |
| | | CAGAAGTTCAAGGACCGTTTCACTATAAGCGTAGA |
| | | TAAATCCAAAAACACAGCCTACCTGCAAATGAACA |
| | | GCCTGCGTGCTGAGGACACTGCCGTCTATTATTGT |
| | | GCTAGAAGCGGATACTACGGCGATAGTGACTGGTA |
| | | TTTTGACGTGTGGGGTCAAGGAACCCTGGTCACCG |
| | | TCTCCTCGACATCTGGCGGCGGAGGATCTCTGGAA |
| | | TCTGGACAGGTGCTGCTGGAAAGCAACATCAAGGT |
| | | GCTGCCCACCTGGTCTACCCCAGTTCAGCCTATGG |
| | | CTCTGATTGTGCTTGGCGGAGTTGCCGGCCTGCTG |
| | | CTCTTTATCGGCCTGGGCATCTTCTTTTGCGTGCG |
| | | GTGCAGACATCGGCGGAGACAGGCTGAGAGAATGA |
| | | GCCAGATCAAGCGGCTGCTGAGCGAGAAGAAAACC |
| | | TGTCAGTGCCCTCACCGGTTCCAGAAAACATGCAG |
| | | CCCCATC |
| 673 | Nucleotide | ATGGCTCTGCCTGTGACAGCTCTGTTGCTGCCTCT |
| | | GGCTCTGCTGCTGCATGCTGCTAGACCTGAGGTGC |
| | | AGCTGTTGGAGTCTGGGGGAGGCCTGGTCAAGCCT |
| | | GGGGGGTCCCTGAGACTCTCCTGTGCAGCCTCTGG |
| | | ATTCACCTTCAGTAGCTATAGCATGAACTGGGTCC |
| | | GCCAGGCTCCAGGGAAGGGGCTGGAGTGGGTCTCA |
| | | GCTATTAGTGGTAGTGGTGGTAGCACATACTACGC |
| | | AGACTCCGTGAAGGGCCGGTTCACCATCTCCAGAG |
| | | ACAATTCCAAGAACACGCTGTATCTGCAAATGAAC |
| | | AGCCTGAGAGCCGAGGACACGGCTGTGTATTACTG |
| | | TGCGAGAGCACGTGGATACAGCTATGGCTCTGATG |
| | | CTTTTGATATCTGGGGCCAAGGGACAATGGTCACC |
| | | GTGTCTTCAGGGTCAACCTCTGGTAGCGGTAAGCC |
| | | TGGCTCCGGCGAAGGCTCCACAAAGGGTCAGTCTG |
| | | TGCTGACTCAGCCACCCTCAGCGTCTGGGACCCCC |
| | | GGGCAGAGGGTCACCATCTCTTGTTCTGGAAGCAG |
| | | CTCCAACATCGGAAGTAATTATGTATACTGGTACC |
| | | AGCAGCTCCCAGGAACGGCCCCCAAACTCCTCATC |
| | | TATAGGAATAATCAGCGGCCCTCAGGGGTCCCTGA |
| | | CCGATTCTCTGGCTCCAAGTCTGGCACCTCAGCCT |
| | | CCCTGGCCATCAGTGGGCTCCGGTCCGAGGATGAG |
| | | GCTGATTATTACTGTGCAGCATGGGATGACAGCCT |
| | | GAGTGGCGTGGTATTCGGCGGAGGGACCAAGCTGA |
| | | CCGTCCTAGAGCAGAAACTGATCAGCGAGGAAGAT |
| | | CTGAATCCTGGCGGAGGCGGAGGAAGTGGTGGCGG |
| | | AGGTTCTGGTGGCGGTGGATCAGGCGGTGGCGGAT |
| | | CTGGATCTATGGATATCCAGATGACCCAGTCCCCG |
| | | AGCTCCCTGTCCGCCTCTGTGGGCGATAGGGTCAC |
| | | CATCACCTGCCGTGCCAGTCAGGACATCCGTAATT |
| | | ATCTGAACTGGTATCAACAGAAACCAGGAAAAGCT |
| | | CCGAAACTACTGATTTACTATACCTCCCGCCTGGA |
| | | GTCTGGAGTCCCTTCTCGCTTCTCTGGTTCTGGTT |
| | | CTGGGACGGATTACACTCTGACCATCAGCAGTCTG |
| | | CAACCGGAAGACTTCGCAACTTATTACTGTCAGCA |
| | | AGGTAATACTCTGCCGTGGACGTTCGGACAGGGCA |
| | | CCAAGGTGGAGATCAAAGGCGGCGGCGGAAGTGGA |
| | | GGAGGAGGCTCAGGCGGAGGAGGGAGCGAGGTTCA |
| | | GCTGGTGGAGTCTGGCGGTGGCCTGGTGCAGCCAG |
| | | GGGGCTCACTCCGTTTGTCCTGTGCAGCTTCTGGC |
| | | TACTCCTTTACCGGCTACACTATGAACTGGGTGCG |
| | | TCAGGCCCCAGGTAAGGGCCTGGAATGGGTTGCAC |
| | | TGATTAATCCTTATAAAGGTGTTAGTACCTACAAC |
| | | CAGAAGTTCAAGGACCGTTTCACTATAAGCGTAGA |
| | | TAAATCCAAAAACACAGCCTACCTGCAAATGAACA |
| | | GCCTGCGTGCTGAGGACACTGCCGTCTATTATTGT |
| | | GCTAGAAGCGGATACTACGGCGATAGTGACTGGTA |
| | | TTTTGACGTGTGGGGTCAAGGAACCCTGGTCACCG |
| | | TCTCCTCGACATCTGGCGGCGGAGGATCTCTGGAA |
| | | TCTGGACAGGTGCTGCTGGAAAGCAACATCAAGGT |
| | | GCTGCCCACCTGGTCTACCCCAGTTCAGCCTATGG |
| | | CTCTGATTGTGCTTGGCGGAGTTGCCGGCCTGCTG |
| | | CTCTTTATCGGCCTGGGCATCTTCTTTTGCGTGCG |
| | | GTGCAGACATCGGCGGAGACAGGCTGAGAGAATGA |
| | | GCCAGATCAAGCGGCTGCTGAGCGAGAAGAAAACC |
| | | TGTCAGTGCCCTCACCGGTTCCAGAAAACATGCAG |
| | | CCCCATC |
| 674 | Nucleotide | ATGGCTCTGCCTGTGACAGCTCTGTTGCTGCCTCT |
| | | GGCTCTGCTGCTGCATGCTGCTAGACCTCAGTCTG |
| | | TGCTGACTCAGCCACCCTCAGCGTCTGGGACCCCC |
| | | GGGCAGAGGGTCACCATCTCTTGTTCTGGAAGCAG |
| | | CTCCAACATCGGAAGTAATTATGTATACTGGTACC |
| | | AGCAGCTCCCAGGAACGGCCCCCAAACTCCTCATC |
| | | TATAGGAATAATCAGCGGCCCTCAGGGGTCCCTGA |
| | | CCGATTCTCTGGCTCCAAGTCTGGCACCTCAGCCT |
| | | CCCTGGCCATCAGTGGGCTCCGGTCCGAGGATGAG |
| | | GCTGATTATTACTGTGCAGCATGGGATGACAGCCT |
| | | GAGTGGCGTGGTATTCGGCGGAGGGACCAAGCTGA |
| | | CCGTCCTAGGGTCAACCTCTGGTAGCGGTAAGCCT |
| | | GGCTCCGGCGAAGGCTCCACAAAGGGTGAGGTGCA |
| | | GCTGTTGGAGTCTGGGGGAGGCCTGGTCAAGCCTG |
| | | GGGGGTCCCTGAGACTCTCCTGTGCAGCCTCTGGA |
| | | TTCACCTTCAGTAGCTATAGCATGAACTGGGTCCG |
| | | CCAGGCTCCAGGGAAGGGGCTGGAGTGGGTCTCAG |
| | | CTATTAGTGGTAGTGGTGGTAGCACATACTACGCA |
| | | GACTCCGTGAAGGGCCGGTTCACCATCTCCAGAGA |
| | | CAATTCCAAGAACACGCTGTATCTGCAAATGAACA |
| | | GCCTGAGAGCCGAGGACACGGCTGTGTATTACTGT |
| | | GCGAGAGCACGTGGATACAGCTATGGCTCTGATGC |
| | | TTTTGATATCTGGGGCCAAGGGACAATGGTCACCG |
| | | TGTCTTCAGAGCAGAAACTGATCAGCGAGGAAGAT |
| | | CTGAATCCTGGCGGAGGCGGAGGAAGTGGTGGCGG |
| | | AGGTTCTGGTGGCGGTGGATCAGGCGGTGGCGGAT |
| | | CTGGATCTATGGATATCCAGATGACCCAGTCCCCG |
| | | AGCTCCCTGTCCGCCTCTGTGGGCGATAGGGTCAC |
| | | CATCACCTGCCGTGCCAGTCAGGACATCCGTAATT |
| | | ATCTGAACTGGTATCAACAGAAACCAGGAAAAGCT |
| | | CCGAAACTACTGATTTACTATACCTCCCGCCTGGA |
| | | GTCTGGAGTCCCTTCTCGCTTCTCTGGTTCTGGTT |
| | | CTGGGACGGATTACACTCTGACCATCAGCAGTCTG |
| | | CAACCGGAAGACTTCGCAACTTATTACTGTCAGCA |
| | | AGGTAATACTCTGCCGTGGACGTTCGGACAGGGCA |
| | | CCAAGGTGGAGATCAAAGGCGGCGGCGGAAGTGGA |
| | | GGAGGAGGCTCAGGCGGAGGAGGGAGCGAGGTTCA |
| | | GCTGGTGGAGTCTGGCGGTGGCCTGGTGCAGCCAG |
| | | GGGGCTCACTCCGTTTGTCCTGTGCAGCTTCTGGC |
| | | TACTCCTTTACCGGCTACACTATGAACTGGGTGCG |
| | | TCAGGCCCCAGGTAAGGGCCTGGAATGGGTTGCAC |
| | | TGATTAATCCTTATAAAGGTGTTAGTACCTACAAC |
| | | CAGAAGTTCAAGGACCGTTTCACTATAAGCGTAGA |
| | | TAAATCCAAAAACACAGCCTACCTGCAAATGAACA |
| | | GCCTGCGTGCTGAGGACACTGCCGTCTATTATTGT |
| | | GCTAGAAGCGGATACTACGGCGATAGTGACTGGTA |
| | | TTTTGACGTGTGGGGTCAAGGAACCCTGGTCACCG |
| | | TCTCCTCGACATCTGGCGGCGGAGGATCTCTGGAA |
| | | TCTGGACAGGTGCTGCTGGAAAGCAACATCAAGGT |
| | | GCTGCCCACCTGGTCTACCCCAGTTCAGCCTATGG |
| | | CTCTGATTGTGCTTGGCGGAGTTGCCGGCCTGCTG |
| | | CTCTTTATCGGCCTGGGCATCTTCTTTTGCGTGCG |
| | | GTGCAGACATCGGCGGAGACAGGCTGAGAGAATGA |
| | | GCCAGATCAAGCGGCTGCTGAGCGAGAAGAAAACC |
| | | TGTCAGTGCCCTCACCGGTTCCAGAAAACATGCAG |
| | | CCCCATC |
| 675 | Nucleotide | ATGGCTCTGCCTGTGACAGCTCTGTTGCTGCCTCT |
| | | GGCTCTGCTGCTGCATGCTGCTAGACCTGAGGTGC |
| | | AGCTGGTGCAGTCTGGGGCTGAGGTGAAGAAGCCT |
| | | GGGTCCTCGGTGAAGGTCTCCTGCAAGGCTTCCGG |
| | | AGGCACCTTCAGCAGCTATGCTATCAGCTGGGTGC |
| | | GACAGGCCCCTGGACAAGGGCTTGAGTGGATGGGA |
| | | GGGATCATCCCTATCTTTGGTACAGCAAACTACGC |
| | | ACAGAAGTTCCAGGGCAGAGTCACGATTACCGCGG |
| | | ACGAATCCACGAGCACAGCCTACATGGAGCTGAGC |
| | | AGCCTGAGGAGCGAGGACACGGCCGTGTATTACTG |
| | | TGCGAGAGATCGGGGGAGAAGATATTGTAGTGGTG |
| | | GTAGCTGCCCTAATGCTTTTGATATCTGGGGCCAA |
| | | GGGACAATGGTCACCGTGTCTTCAGGGTCAACCTC |
| | | TGGTAGCGGTAAGCCTGGCTCCGGCGAAGGCTCCA |
| | | CAAAGGGTGAAATTGTGTTGACACAGTCTCCAGCC |
| | | ACCCTGTCTGTGTCTCCAGGGGAAAGAGCCACCCT |
| | | CTCCTGCAGGGCCAGTCAGAGTGTTAGCAGCAACT |
| | | TAGCCTGGTACCAGCAGAAACCTGGCCAGGCTCCC |
| | | AGGCTCCTCATCTATGGTGCATCCACCAGGGCCAC |
| | | TGGTATCCCAGCCAGGTTCAGTGGCAGTGGGTCTG |
| | | GGACAGAGTTCACTCTCACCATCAGCAGCCTGCAG |
| | | TCTGAAGATTTTGCAGTTTATTACTGTCAGCAGTA |
| | | TAATAACTGGCCCCCGGCCCTCACTTTCGGCGGAG |
| | | GGACCAAGGTGGAAATCAAAGAGCAGAAACTGATC |
| | | AGCGAGGAAGATCTGAATCCTGGCGGAGGCGGAGG |
| | | AAGTGGTGGCGGAGGTTCTGGTGGCGGTGGATCAG |
| | | GCGGTGGCGGATCTGGATCTATGGATATCCAGATG |
| | | ACCCAGTCCCCGAGCTCCCTGTCCGCCTCTGTGGG |
| | | CGATAGGGTCACCATCACCTGCCGTGCCAGTCAGG |
| | | ACATCCGTAATTATCTGAACTGGTATCAACAGAAA |
| | | CCAGGAAAAGCTCCGAAACTACTGATTTACTATAC |
| | | CTCCCGCCTGGAGTCTGGAGTCCCTTCTCGCTTCT |
| | | CTGGTTCTGGTTCTGGGACGGATTACACTCTGACC |
| | | ATCAGCAGTCTGCAACCGGAAGACTTCGCAACTTA |
| | | TTACTGTCAGCAAGGTAATACTCTGCCGTGGACGT |
| | | TCGGACAGGGCACCAAGGTGGAGATCAAAGGCGGC |
| | | GGCGGAAGTGGAGGAGGAGGCTCAGGCGGAGGAGG |
| | | GAGCGAGGTTCAGCTGGTGGAGTCTGGCGGTGGCC |
| | | TGGTGCAGCCAGGGGGCTCACTCCGTTTGTCCTGT |
| | | GCAGCTTCTGGCTACTCCTTTACCGGCTACACTAT |
| | | GAACTGGGTGCGTCAGGCCCCAGGTAAGGGCCTGG |
| | | AATGGGTTGCACTGATTAATCCTTATAAAGGTGTT |
| | | AGTACCTACAACCAGAAGTTCAAGGACCGTTTCAC |
| | | TATAAGCGTAGATAAATCCAAAAACACAGCCTACC |
| | | TGCAAATGAACAGCCTGCGTGCTGAGGACACTGCC |
| | | GTCTATTATTGTGCTAGAAGCGGATACTACGGCGA |
| | | TAGTGACTGGTATTTTGACGTGTGGGGTCAAGGAA |
| | | CCCTGGTCACCGTCTCCTCGACATCTGGCGGCGGA |
| | | GGATCTCTGGAATCTGGACAGGTGCTGCTGGAAAG |
| | | CAACATCAAGGTGCTGCCCACCTGGTCTACCCCAG |
| | | TTCAGCCTATGGCTCTGATTGTGCTTGGCGGAGTT |
| | | GCCGGCCTGCTGCTCTTTATCGGCCTGGGCATCTT |
| | | CTTTTGCGTGCGGTGCAGACATCGGCGGAGACAGG |
| | | CTGAGAGAATGAGCCAGATCAAGCGGCTGCTGAGC |
| | | GAGAAGAAAACCTGTCAGTGCCCTCACCGGTTCCA |
| | | GAAAACATGCAGCCCCATC |
| 676 | Nucleotide | ATGGCTCTGCCTGTGACAGCTCTGTTGCTGCCTCT |
| | | GGCTCTGCTGCTGCATGCTGCTAGACCTGAAATTG |
| | | TGTTGACACAGTCTCCAGCCACCCTGTCTGTGTCT |
| | | CCAGGGGAAAGAGCCACCCTCTCCTGCAGGGCCAG |
| | | TCAGAGTGTTAGCAGCAACTTAGCCTGGTACCAGC |
| | | AGAAACCTGGCCAGGCTCCCAGGCTCCTCATCTAT |
| | | GGTGCATCCACCAGGGCCACTGGTATCCCAGCCAG |
| | | GTTCAGTGGCAGTGGGTCTGGGACAGAGTTCACTC |
| | | TCACCATCAGCAGCCTGCAGTCTGAAGATTTTGCA |
| | | GTTTATTACTGTCAGCAGTATAATAACTGGCCCCC |
| | | GGCCCTCACTTTCGGCGGAGGGACCAAGGTGGAAA |
| | | TCAAAGGGTCAACCTCTGGTAGCGGTAAGCCTGGC |
| | | TCCGGCGAAGGCTCCACAAAGGGTGAGGTGCAGCT |
| | | GGTGCAGTCTGGGGCTGAGGTGAAGAAGCCTGGGT |
| | | CCTCGGTGAAGGTCTCCTGCAAGGCTTCCGGAGGC |
| | | ACCTTCAGCAGCTATGCTATCAGCTGGGTGCGACA |
| | | GGCCCCTGGACAAGGGCTTGAGTGGATGGGAGGGA |
| | | TCATCCCTATCTTTGGTACAGCAAACTACGCACAG |
| | | AAGTTCCAGGGCAGAGTCACGATTACCGCGGACGA |
| | | ATCCACGAGCACAGCCTACATGGAGCTGAGCAGCC |
| | | TGAGGAGCGAGGACACGGCCGTGTATTACTGTGCG |
| | | AGAGATCGGGGGAGAAGATATTGTAGTGGTGGTAG |
| | | CTGCCCTAATGCTTTTGATATCTGGGGCCAAGGGA |
| | | CAATGGTCACCGTGTCTTCAGAGCAGAAACTGATC |
| | | AGCGAGGAAGATCTGAATCCTGGCGGAGGCGGAGG |
| | | AAGTGGTGGCGGAGGTTCTGGTGGCGGTGGATCAG |
| | | GCGGTGGCGGATCTGGATCTATGGATATCCAGATG |
| | | ACCCAGTCCCCGAGCTCCCTGTCCGCCTCTGTGGG |
| | | CGATAGGGTCACCATCACCTGCCGTGCCAGTCAGG |
| | | ACATCCGTAATTATCTGAACTGGTATCAACAGAAA |
| | | CCAGGAAAAGCTCCGAAACTACTGATTTACTATAC |
| | | CTCCCGCCTGGAGTCTGGAGTCCCTTCTCGCTTCT |
| | | CTGGTTCTGGTTCTGGGACGGATTACACTCTGACC |
| | | ATCAGCAGTCTGCAACCGGAAGACTTCGCAACTTA |
| | | TTACTGTCAGCAAGGTAATACTCTGCCGTGGACGT |
| | | TCGGACAGGGCACCAAGGTGGAGATCAAAGGCGGC |
| | | GGCGGAAGTGGAGGAGGAGGCTCAGGCGGAGGAGG |
| | | GAGCGAGGTTCAGCTGGTGGAGTCTGGCGGTGGCC |
| | | TGGTGCAGCCAGGGGGCTCACTCCGTTTGTCCTGT |
| | | GCAGCTTCTGGCTACTCCTTTACCGGCTACACTAT |
| | | GAACTGGGTGCGTCAGGCCCCAGGTAAGGGCCTGG |
| | | AATGGGTTGCACTGATTAATCCTTATAAAGGTGTT |
| | | AGTACCTACAACCAGAAGTTCAAGGACCGTTTCAC |
| | | TATAAGCGTAGATAAATCCAAAAACACAGCCTACC |
| | | TGCAAATGAACAGCCTGCGTGCTGAGGACACTGCC |
| | | GTCTATTATTGTGCTAGAAGCGGATACTACGGCGA |
| | | TAGTGACTGGTATTTTGACGTGTGGGGTCAAGGAA |
| | | CCCTGGTCACCGTCTCCTCGACATCTGGCGGCGGA |
| | | GGATCTCTGGAATCTGGACAGGTGCTGCTGGAAAG |
| | | CAACATCAAGGTGCTGCCCACCTGGTCTACCCCAG |
| | | TTCAGCCTATGGCTCTGATTGTGCTTGGCGGAGTT |
| | | GCCGGCCTGCTGCTCTTTATCGGCCTGGGCATCTT |
| | | CTTTTGCGTGCGGTGCAGACATCGGCGGAGACAGG |
| | | CTGAGAGAATGAGCCAGATCAAGCGGCTGCTGAGC |
| | | GAGAAGAAAACCTGTCAGTGCCCTCACCGGTTCCA |
| | | GAAAACATGCAGCCCCATC |
| 677 | Nucleotide | ATGGCTCTGCCTGTGACAGCTCTGTTGCTGCCTCT |
| | | GGCTCTGCTGCTGCATGCTGCTAGACCTCAGGTTC |
| | | AGCTGGTGCAGTCTGGGGCTGAGGTGAAGAAGCCT |
| | | GGGTCCTCGGTGAAGGTCTCCTGCAAGGCTTCTGG |
| | | AGGCACCTTCAGCAGCTATGCTATCAGCTGGGTGC |
| | | GACAGGCCCCTGGACAAGGGCTTGAGTGGATGGGA |
| | | GGGATCATCCCTATCTTTGGTACAGCAAACTACGC |
| | | ACAGAAGTTCCAGGGCAGAGTCACGATTACCGCGG |
| | | ACGAATCCACGAGCACAGCCTACATGGAGCTGAGC |
| | | AGCCTGAGGAGCGAGGACACGGCCGTGTATTACTG |
| | | TGCGAGAGGGGGTTACGTTTGGGGGAGTTATCGTC |
| | | AGAACTCCAACTGGTTCGACCCCTGGGGCCAGGGA |
| | | ACCCTGGTCACCGTGTCCTCAGGGTCAACCTCTGG |
| | | TAGCGGTAAGCCTGGCTCCGGCGAAGGCTCCACAA |
| | | AGGGTTCCTATGTGCTGACTCAGCCACCCTCAGCG |
| | | TCTGGGACCCCCGGGCAGAGGGTCACCATCTCTTG |
| | | TTCTGGAAGCAGCTCCAACATCGGAAGTAATTATG |
| | | TATACTGGTACCAGCAGCTCCCAGGAACGGCCCCC |
| | | AAACTCCTCATCTATAGGAATAATCAGCGGCCCTC |
| | | AGGGGTCCCTGACCGATTCTCTGGCTCCAAGTCTG |
| | | GCACCTCAGCCTCCCTGGCCATCAGTGGGCTCCGG |
| | | TCCGAGGATGAGGCTGATTATTACTGTGCAGCATG |
| | | GGATGACAGCCTGAGTGGTTGGGTGTTCGGCGGAG |
| | | GGACCAAGCTGACCGTCCTAGAGCAGAAACTGATC |
| | | AGCGAGGAAGATCTGAATCCTGGCGGAGGCGGAGG |
| | | AAGTGGTGGCGGAGGTTCTGGTGGCGGTGGATCAG |
| | | GCGGTGGCGGATCTGGATCTATGGATATCCAGATG |
| | | ACCCAGTCCCCGAGCTCCCTGTCCGCCTCTGTGGG |
| | | CGATAGGGTCACCATCACCTGCCGTGCCAGTCAGG |
| | | ACATCCGTAATTATCTGAACTGGTATCAACAGAAA |
| | | CCAGGAAAAGCTCCGAAACTACTGATTTACTATAC |
| | | CTCCCGCCTGGAGTCTGGAGTCCCTTCTCGCTTCT |
| | | CTGGTTCTGGTTCTGGGACGGATTACACTCTGACC |
| | | ATCAGCAGTCTGCAACCGGAAGACTTCGCAACTTA |
| | | TTACTGTCAGCAAGGTAATACTCTGCCGTGGACGT |
| | | TCGGACAGGGCACCAAGGTGGAGATCAAAGGCGGC |
| | | GGCGGAAGTGGAGGAGGAGGCTCAGGCGGAGGAGG |
| | | GAGCGAGGTTCAGCTGGTGGAGTCTGGCGGTGGCC |
| | | TGGTGCAGCCAGGGGGCTCACTCCGTTTGTCCTGT |
| | | GCAGCTTCTGGCTACTCCTTTACCGGCTACACTAT |
| | | GAACTGGGTGCGTCAGGCCCCAGGTAAGGGCCTGG |
| | | AATGGGTTGCACTGATTAATCCTTATAAAGGTGTT |
| | | AGTACCTACAACCAGAAGTTCAAGGACCGTTTCAC |
| | | TATAAGCGTAGATAAATCCAAAAACACAGCCTACC |
| | | TGCAAATGAACAGCCTGCGTGCTGAGGACACTGCC |
| | | GTCTATTATTGTGCTAGAAGCGGATACTACGGCGA |
| | | TAGTGACTGGTATTTTGACGTGTGGGGTCAAGGAA |
| | | CCCTGGTCACCGTCTCCTCGACATCTGGCGGCGGA |
| | | GGATCTCTGGAATCTGGACAGGTGCTGCTGGAAAG |
| | | CAACATCAAGGTGCTGCCCACCTGGTCTACCCCAG |
| | | TTCAGCCTATGGCTCTGATTGTGCTTGGCGGAGTT |
| | | GCCGGCCTGCTGCTCTTTATCGGCCTGGGCATCTT |
| | | CTTTTGCGTGCGGTGCAGACATCGGCGGAGACAGG |
| | | CTGAGAGAATGAGCCAGATCAAGCGGCTGCTGAGC |
| | | GAGAAGAAAACCTGTCAGTGCCCTCACCGGTTCCA |
| | | GAAAACATGCAGCCCCATC |
| 678 | Nucleotide | ATGGCTCTGCCTGTGACAGCTCTGTTGCTGCCTCT |
| | | GGCTCTGCTGCTGCATGCTGCTAGACCTTCCTATG |
| | | TGCTGACTCAGCCACCCTCAGCGTCTGGGACCCCC |
| | | GGGCAGAGGGTCACCATCTCTTGTTCTGGAAGCAG |
| | | CTCCAACATCGGAAGTAATTATGTATACTGGTACC |
| | | AGCAGCTCCCAGGAACGGCCCCCAAACTCCTCATC |
| | | TATAGGAATAATCAGCGGCCCTCAGGGGTCCCTGA |
| | | CCGATTCTCTGGCTCCAAGTCTGGCACCTCAGCCT |
| | | CCCTGGCCATCAGTGGGCTCCGGTCCGAGGATGAG |
| | | GCTGATTATTACTGTGCAGCATGGGATGACAGCCT |
| | | GAGTGGTTGGGTGTTCGGCGGAGGGACCAAGCTGA |
| | | CCGTCCTAGGGTCAACCTCTGGTAGCGGTAAGCCT |
| | | GGCTCCGGCGAAGGCTCCACAAAGGGTCAGGTTCA |
| | | GCTGGTGCAGTCTGGGGCTGAGGTGAAGAAGCCTG |
| | | GGTCCTCGGTGAAGGTCTCCTGCAAGGCTTCTGGA |
| | | GGCACCTTCAGCAGCTATGCTATCAGCTGGGTGCG |
| | | ACAGGCCCCTGGACAAGGGCTTGAGTGGATGGGAG |
| | | GGATCATCCCTATCTTTGGTACAGCAAACTACGCA |
| | | CAGAAGTTCCAGGGCAGAGTCACGATTACCGCGGA |
| | | CGAATCCACGAGCACAGCCTACATGGAGCTGAGCA |
| | | GCCTGAGGAGCGAGGACACGGCCGTGTATTACTGT |
| | | GCGAGAGGGGGTTACGTTTGGGGGAGTTATCGTCA |
| | | GAACTCCAACTGGTTCGACCCCTGGGGCCAGGGAA |
| | | CCCTGGTCACCGTGTCCTCAGAGCAGAAACTGATC |
| | | AGCGAGGAAGATCTGAATCCTGGCGGAGGCGGAGG |
| | | AAGTGGTGGCGGAGGTTCTGGTGGCGGTGGATCAG |
| | | GCGGTGGCGGATCTGGATCTATGGATATCCAGATG |
| | | ACCCAGTCCCCGAGCTCCCTGTCCGCCTCTGTGGG |
| | | CGATAGGGTCACCATCACCTGCCGTGCCAGTCAGG |
| | | ACATCCGTAATTATCTGAACTGGTATCAACAGAAA |
| | | CCAGGAAAAGCTCCGAAACTACTGATTTACTATAC |
| | | CTCCCGCCTGGAGTCTGGAGTCCCTTCTCGCTTCT |
| | | CTGGTTCTGGTTCTGGGACGGATTACACTCTGACC |
| | | ATCAGCAGTCTGCAACCGGAAGACTTCGCAACTTA |
| | | TTACTGTCAGCAAGGTAATACTCTGCCGTGGACGT |
| | | TCGGACAGGGCACCAAGGTGGAGATCAAAGGCGGC |
| | | GGCGGAAGTGGAGGAGGAGGCTCAGGCGGAGGAGG |
| | | GAGCGAGGTTCAGCTGGTGGAGTCTGGCGGTGGCC |
| | | TGGTGCAGCCAGGGGGCTCACTCCGTTTGTCCTGT |
| | | GCAGCTTCTGGCTACTCCTTTACCGGCTACACTAT |
| | | GAACTGGGTGCGTCAGGCCCCAGGTAAGGGCCTGG |
| | | AATGGGTTGCACTGATTAATCCTTATAAAGGTGTT |
| | | AGTACCTACAACCAGAAGTTCAAGGACCGTTTCAC |
| | | TATAAGCGTAGATAAATCCAAAAACACAGCCTACC |
| | | TGCAAATGAACAGCCTGCGTGCTGAGGACACTGCC |
| | | GTCTATTATTGTGCTAGAAGCGGATACTACGGCGA |
| | | TAGTGACTGGTATTTTGACGTGTGGGGTCAAGGAA |
| | | CCCTGGTCACCGTCTCCTCGACATCTGGCGGCGGA |
| | | GGATCTCTGGAATCTGGACAGGTGCTGCTGGAAAG |
| | | CAACATCAAGGTGCTGCCCACCTGGTCTACCCCAG |
| | | TTCAGCCTATGGCTCTGATTGTGCTTGGCGGAGTT |
| | | GCCGGCCTGCTGCTCTTTATCGGCCTGGGCATCTT |
| | | CTTTTGCGTGCGGTGCAGACATCGGCGGAGACAGG |
| | | CTGAGAGAATGAGCCAGATCAAGCGGCTGCTGAGC |
| | | GAGAAGAAAACCTGTCAGTGCCCTCACCGGTTCCA |
| | | GAAAACATGCAGCCCCATC |
| 679 | Nucleotide | ATGGCTCTGCCTGTGACAGCTCTGTTGCTGCCTCT |
| | | GGCTCTGCTGCTGCATGCTGCTAGACCTCAGGTGC |
| | | AGCTGGTGGAGTCTGGGGCTGAGGTGAAGAAGCCT |
| | | GGGTCCTCGGTGAAGGTCTCCTGCAAGGCTTCTGG |
| | | AGGCACCTTCAGCAGCTATGCTATCAGCTGGGTGC |
| | | GACAGGCCCCTGGACAAGGGCTTGAGTGGATGGGA |
| | | GGGATCATCCCTATCTTTGGTACAGCAAACTACGC |
| | | ACAGAAGTTCCAGGGCAGAGTCACGATTACCGCGG |
| | | ACAAATCCACGAGCACAGCCTACATGGAGCTGAGC |
| | | AGCCTGAGGAGCGAGGACACGGCCGTGTATTACTG |
| | | TGCGAGGACCCATCTACCATACAGCTATGGTTTAG |
| | | GCGGGTTTGACTACTGGGGCCAGGGAACCCTGGTC |
| | | ACCGTGTCCTCAGGGTCAACCTCTGGTAGCGGTAA |
| | | GCCTGGCTCCGGCGAAGGCTCCACAAAGGGTCAGT |
| | | CTGTGCTGACGCAGCCGCCCTCAGTGTCTGGGGCC |
| | | CCAGGGCAGAGGGTCACCATCTCCTGCACTGGGAG |
| | | CAGCTCCAACATCGGGGCAGGTTATGATGTACACT |
| | | GGTACCAGCAGCTTCCAGGAACAGCCCCCAAACTC |
| | | CTCATCTATGGTAACAGCAATCGGCCCTCAGGGGT |
| | | CCCTGACCGATTCTCTGGCTCCAAGTCTGGCACCT |
| | | CAGCCTCCCTGGCCATCACTGGGCTCCAGGCTGAG |
| | | GATGAGGCTGATTATTACTGCCAGTCCTATGACAG |
| | | CAGCCTGAGTGGCCCGGTGGTATTCGGCGGAGGGA |
| | | CCAAGGTCACCGTCCTAGAGCAGAAACTGATCAGC |
| | | GAGGAAGATCTGAATCCTGGCGGAGGCGGAGGAAG |
| | | TGGTGGCGGAGGTTCTGGTGGCGGTGGATCAGGCG |
| | | GTGGCGGATCTGGATCTATGGATATCCAGATGACC |
| | | CAGTCCCCGAGCTCCCTGTCCGCCTCTGTGGGCGA |
| | | TAGGGTCACCATCACCTGCCGTGCCAGTCAGGACA |
| | | TCCGTAATTATCTGAACTGGTATCAACAGAAACCA |
| | | GGAAAAGCTCCGAAACTACTGATTTACTATACCTC |
| | | CCGCCTGGAGTCTGGAGTCCCTTCTCGCTTCTCTG |
| | | GTTCTGGTTCTGGGACGGATTACACTCTGACCATC |
| | | AGCAGTCTGCAACCGGAAGACTTCGCAACTTATTA |
| | | CTGTCAGCAAGGTAATACTCTGCCGTGGACGTTCG |
| | | GACAGGGCACCAAGGTGGAGATCAAAGGCGGCGGC |
| | | GGAAGTGGAGGAGGAGGCTCAGGCGGAGGAGGGAG |
| | | CGAGGTTCAGCTGGTGGAGTCTGGCGGTGGCCTGG |
| | | TGCAGCCAGGGGGCTCACTCCGTTTGTCCTGTGCA |
| | | GCTTCTGGCTACTCCTTTACCGGCTACACTATGAA |
| | | CTGGGTGCGTCAGGCCCCAGGTAAGGGCCTGGAAT |
| | | GGGTTGCACTGATTAATCCTTATAAAGGTGTTAGT |
| | | ACCTACAACCAGAAGTTCAAGGACCGTTTCACTAT |
| | | AAGCGTAGATAAATCCAAAAACACAGCCTACCTGC |
| | | AAATGAACAGCCTGCGTGCTGAGGACACTGCCGTC |
| | | TATTATTGTGCTAGAAGCGGATACTACGGCGATAG |
| | | TGACTGGTATTTTGACGTGTGGGGTCAAGGAACCC |
| | | TGGTCACCGTCTCCTCGACATCTGGCGGCGGAGGA |
| | | TCTCTGGAATCTGGACAGGTGCTGCTGGAAAGCAA |
| | | CATCAAGGTGCTGCCCACCTGGTCTACCCCAGTTC |
| | | AGCCTATGGCTCTGATTGTGCTTGGCGGAGTTGCC |
| | | GGCCTGCTGCTCTTTATCGGCCTGGGCATCTTCTT |
| | | TTGCGTGCGGTGCAGACATCGGCGGAGACAGGCTG |
| | | AGAGAATGAGCCAGATCAAGCGGCTGCTGAGCGAG |
| | | AAGAAAACCTGTCAGTGCCCTCACCGGTTCCAGAA |
| | | AACATGCAGCCCCATC |
| 680 | Nucleotide | ATGGCTCTGCCTGTGACAGCTCTGTTGCTGCCTCT |
| | | GGCTCTGCTGCTGCATGCTGCTAGACCTCAGTCTG |
| | | TGCTGACGCAGCCGCCCTCAGTGTCTGGGGCCCCA |
| | | GGGCAGAGGGTCACCATCTCCTGCACTGGGAGCAG |
| | | CTCCAACATCGGGGCAGGTTATGATGTACACTGGT |
| | | ACCAGCAGCTTCCAGGAACAGCCCCCAAACTCCTC |
| | | ATCTATGGTAACAGCAATCGGCCCTCAGGGGTCCC |
| | | TGACCGATTCTCTGGCTCCAAGTCTGGCACCTCAG |
| | | CCTCCCTGGCCATCACTGGGCTCCAGGCTGAGGAT |
| | | GAGGCTGATTATTACTGCCAGTCCTATGACAGCAG |
| | | CCTGAGTGGCCCGGTGGTATTCGGCGGAGGGACCA |
| | | AGGTCACCGTCCTAGGGTCAACCTCTGGTAGCGGT |
| | | AAGCCTGGCTCCGGCGAAGGCTCCACAAAGGGTCA |
| | | GGTGCAGCTGGTGGAGTCTGGGGCTGAGGTGAAGA |
| | | AGCCTGGGTCCTCGGTGAAGGTCTCCTGCAAGGCT |
| | | TCTGGAGGCACCTTCAGCAGCTATGCTATCAGCTG |
| | | GGTGCGACAGGCCCCTGGACAAGGGCTTGAGTGGA |
| | | TGGGAGGGATCATCCCTATCTTTGGTACAGCAAAC |
| | | TACGCACAGAAGTTCCAGGGCAGAGTCACGATTAC |
| | | CGCGGACAAATCCACGAGCACAGCCTACATGGAGC |
| | | TGAGCAGCCTGAGGAGCGAGGACACGGCCGTGTAT |
| | | TACTGTGCGAGGACCCATCTACCATACAGCTATGG |
| | | TTTAGGCGGGTTTGACTACTGGGGCCAGGGAACCC |
| | | TGGTCACCGTGTCCTCAGAGCAGAAACTGATCAGC |
| | | GAGGAAGATCTGAATCCTGGCGGAGGCGGAGGAAG |
| | | TGGTGGCGGAGGTTCTGGTGGCGGTGGATCAGGCG |
| | | GTGGCGGATCTGGATCTATGGATATCCAGATGACC |
| | | CAGTCCCCGAGCTCCCTGTCCGCCTCTGTGGGCGA |
| | | TAGGGTCACCATCACCTGCCGTGCCAGTCAGGACA |
| | | TCCGTAATTATCTGAACTGGTATCAACAGAAACCA |
| | | GGAAAAGCTCCGAAACTACTGATTTACTATACCTC |
| | | CCGCCTGGAGTCTGGAGTCCCTTCTCGCTTCTCTG |
| | | GTTCTGGTTCTGGGACGGATTACACTCTGACCATC |
| | | AGCAGTCTGCAACCGGAAGACTTCGCAACTTATTA |
| | | CTGTCAGCAAGGTAATACTCTGCCGTGGACGTTCG |
| | | GACAGGGCACCAAGGTGGAGATCAAAGGCGGCGGC |
| | | GGAAGTGGAGGAGGAGGCTCAGGCGGAGGAGGGAG |
| | | CGAGGTTCAGCTGGTGGAGTCTGGCGGTGGCCTGG |
| | | TGCAGCCAGGGGGCTCACTCCGTTTGTCCTGTGCA |
| | | GCTTCTGGCTACTCCTTTACCGGCTACACTATGAA |
| | | CTGGGTGCGTCAGGCCCCAGGTAAGGGCCTGGAAT |
| | | GGGTTGCACTGATTAATCCTTATAAAGGTGTTAGT |
| | | ACCTACAACCAGAAGTTCAAGGACCGTTTCACTAT |
| | | AAGCGTAGATAAATCCAAAAACACAGCCTACCTGC |
| | | AAATGAACAGCCTGCGTGCTGAGGACACTGCCGTC |
| | | TATTATTGTGCTAGAAGCGGATACTACGGCGATAG |
| | | TGACTGGTATTTTGACGTGTGGGGTCAAGGAACCC |
| | | TGGTCACCGTCTCCTCGACATCTGGCGGCGGAGGA |
| | | TCTCTGGAATCTGGACAGGTGCTGCTGGAAAGCAA |
| | | CATCAAGGTGCTGCCCACCTGGTCTACCCCAGTTC |
| | | AGCCTATGGCTCTGATTGTGCTTGGCGGAGTTGCC |
| | | GGCCTGCTGCTCTTTATCGGCCTGGGCATCTTCTT |
| | | TTGCGTGCGGTGCAGACATCGGCGGAGACAGGCTG |
| | | AGAGAATGAGCCAGATCAAGCGGCTGCTGAGCGAG |
| | | AAGAAAACCTGTCAGTGCCCTCACCGGTTCCAGAA |
| | | AACATGCAGCCCCATC |
| 681 | Nucleotide | ATGGCTCTGCCTGTGACAGCTCTGTTGCTGCCTCT |
| | | GGCTCTGCTGCTGCATGCTGCTAGACCTCAGGTGC |
| | | AGCTGGTGCAGTCTGGGGCTGAGGTGAAGAAGCCT |
| | | GGGGCCTCAGTGAAGGTCTCCTGCAAGGCTTCTGG |
| | | TTACACCTTTACCAGCTATGGTATCAGCTGGGTGC |
| | | GACAGGCCCCTGGACAAGGGCTTGAGTGGATGGGA |
| | | TGGATCAGCGCTTACAATGGTAACACAAACTATGC |
| | | ACAGAAGCTCCAGGGCAGAGTCACCATGACCACAG |
| | | ACACATCCACGAGCACAGCCTACATGGAGCTGAGG |
| | | AGCCTGAGGAGCGACGACACGGCCGTGTATTACTG |
| | | TGCGAGAGATATAATACGATATTGTAGTAGTACCA |
| | | GCTGCTATAGAGGGATTGACTACTGGGGCCAGGGA |
| | | ACCCTGGTCACCGTGTCCTCAGGGTCAACCTCTGG |
| | | TAGCGGTAAGCCTGGCTCCGGCGAAGGCTCCACAA |
| | | AGGGTCAGTCTGCCCTGACTCAGCCTGCCTCCGTG |
| | | TCTGGGTCTCCTGGACAGTCGATCACCATCTCCTG |
| | | CACTGGAACCAGCAGTGACGTTGGTGGTTATAACT |
| | | ATGTCTCCTGGTACCAACAGCACCCAGGCAAAGCC |
| | | CCCAAACTCATGATTTATGATGTCAGTAATCGGCC |
| | | CTCAGGGGTTTCTAATCGCTTCTCTGGCTCCAAGT |
| | | CTGGCAACACGGCCTCCCTGACCATCTCTGGGCTC |
| | | CAGGCTGAGGACGAGGCTGATTATTACTGCAGCTC |
| | | ATATACAAGCAGCAGCCCCCATGTGGTATCCGGCG |
| | | GAGGGACCAAGCTGACGGTCCTAGAGCAGAAACTG |
| | | ATCAGCGAGGAAGATCTGAATCCTGGCGGAGGCGG |
| | | AGGAAGTGGTGGCGGAGGTTCTGGTGGCGGTGGAT |
| | | CAGGCGGTGGCGGATCTGGATCTATGGATATCCAG |
| | | ATGACCCAGTCCCCGAGCTCCCTGTCCGCCTCTGT |
| | | GGGCGATAGGGTCACCATCACCTGCCGTGCCAGTC |
| | | AGGACATCCGTAATTATCTGAACTGGTATCAACAG |
| | | AAACCAGGAAAAGCTCCGAAACTACTGATTTACTA |
| | | TACCTCCCGCCTGGAGTCTGGAGTCCCTTCTCGCT |
| | | TCTCTGGTTCTGGTTCTGGGACGGATTACACTCTG |
| | | ACCATCAGCAGTCTGCAACCGGAAGACTTCGCAAC |
| | | TTATTACTGTCAGCAAGGTAATACTCTGCCGTGGA |
| | | CGTTCGGACAGGGCACCAAGGTGGAGATCAAAGGC |
| | | GGCGGCGGAAGTGGAGGAGGAGGCTCAGGCGGAGG |
| | | AGGGAGCGAGGTTCAGCTGGTGGAGTCTGGCGGTG |
| | | GCCTGGTGCAGCCAGGGGGCTCACTCCGTTTGTCC |
| | | TGTGCAGCTTCTGGCTACTCCTTTACCGGCTACAC |
| | | TATGAACTGGGTGCGTCAGGCCCCAGGTAAGGGCC |
| | | TGGAATGGGTTGCACTGATTAATCCTTATAAAGGT |
| | | GTTAGTACCTACAACCAGAAGTTCAAGGACCGTTT |
| | | CACTATAAGCGTAGATAAATCCAAAAACACAGCCT |
| | | ACCTGCAAATGAACAGCCTGCGTGCTGAGGACACT |
| | | GCCGTCTATTATTGTGCTAGAAGCGGATACTACGG |
| | | CGATAGTGACTGGTATTTTGACGTGTGGGGTCAAG |
| | | GAACCCTGGTCACCGTCTCCTCGACATCTGGCGGC |
| | | GGAGGATCTCTGGAATCTGGACAGGTGCTGCTGGA |
| | | AAGCAACATCAAGGTGCTGCCCACCTGGTCTACCC |
| | | CAGTTCAGCCTATGGCTCTGATTGTGCTTGGCGGA |
| | | GTTGCCGGCCTGCTGCTCTTTATCGGCCTGGGCAT |
| | | CTTCTTTTGCGTGCGGTGCAGACATCGGCGGAGAC |
| | | AGGCTGAGAGAATGAGCCAGATCAAGCGGCTGCTG |
| | | AGCGAGAAGAAAACCTGTCAGTGCCCTCACCGGTT |
| | | CCAGAAAACATGCAGCCCCATC |
| 682 | Nucleotide | ATGGCTCTGCCTGTGACAGCTCTGTTGCTGCCTCT |
| | | GGCTCTGCTGCTGCATGCTGCTAGACCTCAGTCTG |
| | | CCCTGACTCAGCCTGCCTCCGTGTCTGGGTCTCCT |
| | | GGACAGTCGATCACCATCTCCTGCACTGGAACCAG |
| | | CAGTGACGTTGGTGGTTATAACTATGTCTCCTGGT |
| | | ACCAACAGCACCCAGGCAAAGCCCCCAAACTCATG |
| | | ATTTATGATGTCAGTAATCGGCCCTCAGGGGTTTC |
| | | TAATCGCTTCTCTGGCTCCAAGTCTGGCAACACGG |
| | | CCTCCCTGACCATCTCTGGGCTCCAGGCTGAGGAC |
| | | GAGGCTGATTATTACTGCAGCTCATATACAAGCAG |
| | | CAGCCCCCATGTGGTATCCGGCGGAGGGACCAAGC |
| | | TGACGGTCCTAGGGTCAACCTCTGGTAGCGGTAAG |
| | | CCTGGCTCCGGCGAAGGCTCCACAAAGGGTCAGGT |
| | | GCAGCTGGTGCAGTCTGGGGCTGAGGTGAAGAAGC |
| | | CTGGGGCCTCAGTGAAGGTCTCCTGCAAGGCTTCT |
| | | GGTTACACCTTTACCAGCTATGGTATCAGCTGGGT |
| | | GCGACAGGCCCCTGGACAAGGGCTTGAGTGGATGG |
| | | GATGGATCAGCGCTTACAATGGTAACACAAACTAT |
| | | GCACAGAAGCTCCAGGGCAGAGTCACCATGACCAC |
| | | AGACACATCCACGAGCACAGCCTACATGGAGCTGA |
| | | GGAGCCTGAGGAGCGACGACACGGCCGTGTATTAC |
| | | TGTGCGAGAGATATAATACGATATTGTAGTAGTAC |
| | | CAGCTGCTATAGAGGGATTGACTACTGGGGCCAGG |
| | | GAACCCTGGTCACCGTGTCCTCAGAGCAGAAACTG |
| | | ATCAGCGAGGAAGATCTGAATCCTGGCGGAGGCGG |
| | | AGGAAGTGGTGGCGGAGGTTCTGGTGGCGGTGGAT |
| | | CAGGCGGTGGCGGATCTGGATCTATGGATATCCAG |
| | | ATGACCCAGTCCCCGAGCTCCCTGTCCGCCTCTGT |
| | | GGGCGATAGGGTCACCATCACCTGCCGTGCCAGTC |
| | | AGGACATCCGTAATTATCTGAACTGGTATCAACAG |
| | | AAACCAGGAAAAGCTCCGAAACTACTGATTTACTA |
| | | TACCTCCCGCCTGGAGTCTGGAGTCCCTTCTCGCT |
| | | TCTCTGGTTCTGGTTCTGGGACGGATTACACTCTG |
| | | ACCATCAGCAGTCTGCAACCGGAAGACTTCGCAAC |
| | | TTATTACTGTCAGCAAGGTAATACTCTGCCGTGGA |
| | | CGTTCGGACAGGGCACCAAGGTGGAGATCAAAGGC |
| | | GGCGGCGGAAGTGGAGGAGGAGGCTCAGGCGGAGG |
| | | AGGGAGCGAGGTTCAGCTGGTGGAGTCTGGCGGTG |
| | | GCCTGGTGCAGCCAGGGGGCTCACTCCGTTTGTCC |
| | | TGTGCAGCTTCTGGCTACTCCTTTACCGGCTACAC |
| | | TATGAACTGGGTGCGTCAGGCCCCAGGTAAGGGCC |
| | | TGGAATGGGTTGCACTGATTAATCCTTATAAAGGT |
| | | GTTAGTACCTACAACCAGAAGTTCAAGGACCGTTT |
| | | CACTATAAGCGTAGATAAATCCAAAAACACAGCCT |
| | | ACCTGCAAATGAACAGCCTGCGTGCTGAGGACACT |
| | | GCCGTCTATTATTGTGCTAGAAGCGGATACTACGG |
| | | CGATAGTGACTGGTATTTTGACGTGTGGGGTCAAG |
| | | GAACCCTGGTCACCGTCTCCTCGACATCTGGCGGC |
| | | GGAGGATCTCTGGAATCTGGACAGGTGCTGCTGGA |
| | | AAGCAACATCAAGGTGCTGCCCACCTGGTCTACCC |
| | | CAGTTCAGCCTATGGCTCTGATTGTGCTTGGCGGA |
| | | GTTGCCGGCCTGCTGCTCTTTATCGGCCTGGGCAT |
| | | CTTCTTTTGCGTGCGGTGCAGACATCGGCGGAGAC |
| | | AGGCTGAGAGAATGAGCCAGATCAAGCGGCTGCTG |
| | | AGCGAGAAGAAAACCTGTCAGTGCCCTCACCGGTT |
| | | CCAGAAAACATGCAGCCCCATC |
| 683 | Nucleotide | ATGGCTCTGCCTGTGACAGCTCTGTTGCTGCCTCT |
| | | GGCTCTGCTGCTGCATGCTGCTAGACCTCAGGTGC |
| | | AGCTGGTGGAGTCTGGGGCTGAGGTGAAGAAGCCT |
| | | GGGTCCTCGGTGAAGGTCTCCTGCAAGGCTTCTGG |
| | | AGGCACCTTCAGCAGCTATGCTATCAGCTGGGTGC |
| | | GACAGGCCCCTGGACAAGGGCTTGAGTGGATGGGA |
| | | GGGATCATCCCTATCTTTGGTACAGCAAACTACGC |
| | | ACAGAAGTTCCAGGGCAGAGTCACGATTACCGCGG |
| | | ACGAATCCACGAGCACAGCCTACATGGAGCTGAGC |
| | | AGCCTGAGGAGCGAGGACACGGCCGTGTATTACTG |
| | | TGCGCGCCCCCTGTATGCCCCTCGCTTCGGATACG |
| | | GTATGGACGTCTGGGGCCAAGGGACCCTGGTCACC |
| | | GTGTCCTCAGGGTCAACCTCTGGTAGCGGTAAGCC |
| | | TGGCTCCGGCGAAGGCTCCACAAAGGGTCAGTCTG |
| | | TGTTGACGCAGCCGCCCTCAGCGTCTGGGACCCCC |
| | | GGGCAGAGGGTCACCATCTCTTGTTCTGGAAGCAG |
| | | CTCCAACATCGGAAGTAATTATGTATACTGGTACC |
| | | AGCAGCTCCCAGGAACGGCCCCCAAACTCCTCATC |
| | | TATAGGAATAATCAGCGGCCCTCAGGGGTCCCTGA |
| | | CCGATTCTCTGGCTCCAAGTCTGGCACCTCAGCCT |
| | | CCCTGGCCATCAGTGGGCTCCGGTCCGAGGATGAG |
| | | GCTGATTATTACTGTGCAGCATGGGATGACAGCCT |
| | | GAGTGGTTGGGTGTTCGGCGGAGGCACCCAGCTGA |
| | | CCGTCCTCGAGCAGAAACTGATCAGCGAGGAAGAT |
| | | CTGAATCCTGGCGGAGGCGGAGGAAGTGGTGGCGG |
| | | AGGTTCTGGTGGCGGTGGATCAGGCGGTGGCGGAT |
| | | CTGGATCTATGGATATCCAGATGACCCAGTCCCCG |
| | | AGCTCCCTGTCCGCCTCTGTGGGCGATAGGGTCAC |
| | | CATCACCTGCCGTGCCAGTCAGGACATCCGTAATT |
| | | ATCTGAACTGGTATCAACAGAAACCAGGAAAAGCT |
| | | CCGAAACTACTGATTTACTATACCTCCCGCCTGGA |
| | | GTCTGGAGTCCCTTCTCGCTTCTCTGGTTCTGGTT |
| | | CTGGGACGGATTACACTCTGACCATCAGCAGTCTG |
| | | CAACCGGAAGACTTCGCAACTTATTACTGTCAGCA |
| | | AGGTAATACTCTGCCGTGGACGTTCGGACAGGGCA |
| | | CCAAGGTGGAGATCAAAGGCGGCGGCGGAAGTGGA |
| | | GGAGGAGGCTCAGGCGGAGGAGGGAGCGAGGTTCA |
| | | GCTGGTGGAGTCTGGCGGTGGCCTGGTGCAGCCAG |
| | | GGGGCTCACTCCGTTTGTCCTGTGCAGCTTCTGGC |
| | | TACTCCTTTACCGGCTACACTATGAACTGGGTGCG |
| | | TCAGGCCCCAGGTAAGGGCCTGGAATGGGTTGCAC |
| | | TGATTAATCCTTATAAAGGTGTTAGTACCTACAAC |
| | | CAGAAGTTCAAGGACCGTTTCACTATAAGCGTAGA |
| | | TAAATCCAAAAACACAGCCTACCTGCAAATGAACA |
| | | GCCTGCGTGCTGAGGACACTGCCGTCTATTATTGT |
| | | GCTAGAAGCGGATACTACGGCGATAGTGACTGGTA |
| | | TTTTGACGTGTGGGGTCAAGGAACCCTGGTCACCG |
| | | TCTCCTCGACATCTGGCGGCGGAGGATCTCTGGAA |
| | | TCTGGACAGGTGCTGCTGGAAAGCAACATCAAGGT |
| | | GCTGCCCACCTGGTCTACCCCAGTTCAGCCTATGG |
| | | CTCTGATTGTGCTTGGCGGAGTTGCCGGCCTGCTG |
| | | CTCTTTATCGGCCTGGGCATCTTCTTTTGCGTGCG |
| | | GTGCAGACATCGGCGGAGACAGGCTGAGAGAATGA |
| | | GCCAGATCAAGCGGCTGCTGAGCGAGAAGAAAACC |
| | | TGTCAGTGCCCTCACCGGTTCCAGAAAACATGCAG |
| | | CCCCATC |
| 684 | Nucleotide | ATGGCTCTGCCTGTGACAGCTCTGTTGCTGCCTCT |
| | | GGCTCTGCTGCTGCATGCTGCTAGACCTCAGTCTG |
| | | TGTTGACGCAGCCGCCCTCAGCGTCTGGGACCCCC |
| | | GGGCAGAGGGTCACCATCTCTTGTTCTGGAAGCAG |
| | | CTCCAACATCGGAAGTAATTATGTATACTGGTACC |
| | | AGCAGCTCCCAGGAACGGCCCCCAAACTCCTCATC |
| | | TATAGGAATAATCAGCGGCCCTCAGGGGTCCCTGA |
| | | CCGATTCTCTGGCTCCAAGTCTGGCACCTCAGCCT |
| | | CCCTGGCCATCAGTGGGCTCCGGTCCGAGGATGAG |
| | | GCTGATTATTACTGTGCAGCATGGGATGACAGCCT |
| | | GAGTGGTTGGGTGTTCGGCGGAGGCACCCAGCTGA |
| | | CCGTCCTCGGGTCAACCTCTGGTAGCGGTAAGCCT |
| | | GGCTCCGGCGAAGGCTCCACAAAGGGTCAGGTGCA |
| | | GCTGGTGGAGTCTGGGGCTGAGGTGAAGAAGCCTG |
| | | GGTCCTCGGTGAAGGTCTCCTGCAAGGCTTCTGGA |
| | | GGCACCTTCAGCAGCTATGCTATCAGCTGGGTGCG |
| | | ACAGGCCCCTGGACAAGGGCTTGAGTGGATGGGAG |
| | | GGATCATCCCTATCTTTGGTACAGCAAACTACGCA |
| | | CAGAAGTTCCAGGGCAGAGTCACGATTACCGCGGA |
| | | CGAATCCACGAGCACAGCCTACATGGAGCTGAGCA |
| | | GCCTGAGGAGCGAGGACACGGCCGTGTATTACTGT |
| | | GCGCGCCCCCTGTATGCCCCTCGCTTCGGATACGG |
| | | TATGGACGTCTGGGGCCAAGGGACCCTGGTCACCG |
| | | TGTCCTCAGAGCAGAAACTGATCAGCGAGGAAGAT |
| | | CTGAATCCTGGCGGAGGCGGAGGAAGTGGTGGCGG |
| | | AGGTTCTGGTGGCGGTGGATCAGGCGGTGGCGGAT |
| | | CTGGATCTATGGATATCCAGATGACCCAGTCCCCG |
| | | AGCTCCCTGTCCGCCTCTGTGGGCGATAGGGTCAC |
| | | CATCACCTGCCGTGCCAGTCAGGACATCCGTAATT |
| | | ATCTGAACTGGTATCAACAGAAACCAGGAAAAGCT |
| | | CCGAAACTACTGATTTACTATACCTCCCGCCTGGA |
| | | GTCTGGAGTCCCTTCTCGCTTCTCTGGTTCTGGTT |
| | | CTGGGACGGATTACACTCTGACCATCAGCAGTCTG |
| | | CAACCGGAAGACTTCGCAACTTATTACTGTCAGCA |
| | | AGGTAATACTCTGCCGTGGACGTTCGGACAGGGCA |
| | | CCAAGGTGGAGATCAAAGGCGGCGGCGGAAGTGGA |
| | | GGAGGAGGCTCAGGCGGAGGAGGGAGCGAGGTTCA |
| | | GCTGGTGGAGTCTGGCGGTGGCCTGGTGCAGCCAG |
| | | GGGGCTCACTCCGTTTGTCCTGTGCAGCTTCTGGC |
| | | TACTCCTTTACCGGCTACACTATGAACTGGGTGCG |
| | | TCAGGCCCCAGGTAAGGGCCTGGAATGGGTTGCAC |
| | | TGATTAATCCTTATAAAGGTGTTAGTACCTACAAC |
| | | CAGAAGTTCAAGGACCGTTTCACTATAAGCGTAGA |
| | | TAAATCCAAAAACACAGCCTACCTGCAAATGAACA |
| | | GCCTGCGTGCTGAGGACACTGCCGTCTATTATTGT |
| | | GCTAGAAGCGGATACTACGGCGATAGTGACTGGTA |
| | | TTTTGACGTGTGGGGTCAAGGAACCCTGGTCACCG |
| | | TCTCCTCGACATCTGGCGGCGGAGGATCTCTGGAA |
| | | TCTGGACAGGTGCTGCTGGAAAGCAACATCAAGGT |
| | | GCTGCCCACCTGGTCTACCCCAGTTCAGCCTATGG |
| | | CTCTGATTGTGCTTGGCGGAGTTGCCGGCCTGCTG |
| | | CTCTTTATCGGCCTGGGCATCTTCTTTTGCGTGCG |
| | | GTGCAGACATCGGCGGAGACAGGCTGAGAGAATGA |
| | | GCCAGATCAAGCGGCTGCTGAGCGAGAAGAAAACC |
| | | TGTCAGTGCCCTCACCGGTTCCAGAAAACATGCAG |
| | | CCCCATC |
| 685 | Nucleotide | ATGGCTCTGCCTGTGACAGCTCTGTTGCTGCCTCT |
| | | GGCTCTGCTGCTGCATGCTGCTAGACCTCAGGTGC |
| | | AGCTGCAGGAGAGCGGCGGCGGCCTGGTGCAGCCC |
| | | GGCGGCAGCCTGAGGCTGAGCTGCGCCGCCAGCGG |
| | | CATCATCTTCAGCATCAACACCATGGCCTGGTACA |
| | | GGCAGGGCCCCGGCAAGCAGAGGGACCTGGTGGCC |
| | | CTGATCAGCAGCGGCGGCAACACCAGCTACGCCGA |
| | | CAGCGTGAACGGCAGGTTCACCATCAGCAGGGACA |
| | | ACGCCAAGAACACCGTGTACCTGCAGATGAACGGC |
| | | CTGAAGCCCGAGGACACCGCCGTGTACTACTGCAA |
| | | CAGCGCCGGCAGGAGCTACAGCGGCAGCTACGGCG |
| | | CCTACTGGGGCCAGGGCACCCAGGTGACCGTGAGC |
| | | AGCGAGCAGAAACTGATCAGCGAGGAAGATCTGAA |
| | | TCCTGGCGGAGGCGGAGGAAGTGGTGGCGGAGGTT |
| | | CTGGTGGCGGTGGATCAGGCGGTGGCGGATCTGGA |
| | | TCTATGGATATCCAGATGACCCAGTCCCCGAGCTC |
| | | CCTGTCCGCCTCTGTGGGCGATAGGGTCACCATCA |
| | | CCTGCCGTGCCAGTCAGGACATCCGTAATTATCTG |
| | | AACTGGTATCAACAGAAACCAGGAAAAGCTCCGAA |
| | | ACTACTGATTTACTATACCTCCCGCCTGGAGTCTG |
| | | GAGTCCCTTCTCGCTTCTCTGGTTCTGGTTCTGGG |
| | | ACGGATTACACTCTGACCATCAGCAGTCTGCAACC |
| | | GGAAGACTTCGCAACTTATTACTGTCAGCAAGGTA |
| | | ATACTCTGCCGTGGACGTTCGGACAGGGCACCAAG |
| | | GTGGAGATCAAAGGCGGCGGCGGAAGTGGAGGAGG |
| | | AGGCTCAGGCGGAGGAGGGAGCGAGGTTCAGCTGG |
| | | TGGAGTCTGGCGGTGGCCTGGTGCAGCCAGGGGGC |
| | | TCACTCCGTTTGTCCTGTGCAGCTTCTGGCTACTC |
| | | CTTTACCGGCTACACTATGAACTGGGTGCGTCAGG |
| | | CCCCAGGTAAGGGCCTGGAATGGGTTGCACTGATT |
| | | AATCCTTATAAAGGTGTTAGTACCTACAACCAGAA |
| | | GTTCAAGGACCGTTTCACTATAAGCGTAGATAAAT |
| | | CCAAAAACACAGCCTACCTGCAAATGAACAGCCTG |
| | | CGTGCTGAGGACACTGCCGTCTATTATTGTGCTAG |
| | | AAGCGGATACTACGGCGATAGTGACTGGTATTTTG |
| | | ACGTGTGGGGTCAAGGAACCCTGGTCACCGTCTCC |
| | | TCGACATCTGGCGGCGGAGGATCTCTGGAATCTGG |
| | | ACAGGTGCTGCTGGAAAGCAACATCAAGGTGCTGC |
| | | CCACCTGGTCTACCCCAGTTCAGCCTATGGCTCTG |
| | | ATTGTGCTTGGCGGAGTTGCCGGCCTGCTGCTCTT |
| | | TATCGGCCTGGGCATCTTCTTTTGCGTGCGGTGCA |
| | | GACATCGGCGGAGACAGGCTGAGAGAATGAGCCAG |
| | | ATCAAGCGGCTGCTGAGCGAGAAGAAAACCTGTCA |
| | | GTGCCCTCACCGGTTCCAGAAAACATGCAGCCCCA |
| | | TC |
| 686 | AminoAcid | MALPVTALLLPLALLLHAARPQVQLQESGGGLVQP |
| | | GGSLRLSCAASGIIFSINTMAWYRQGPGKQRDLVA |
| | | LISSGGNTSYADSVNGRFTISRDNAKNTVYLQMNG |
| | | LKPEDTAVYYCNSAGRSYSGSYGAYWGQGTQVTVS |
| | | SEQKLISEEDLNPGGGGGSGGGGSGGGGSGGGGSG |
| | | SMDIQMTQSPSSLSASVGDRVTITCRASQDIRNYL |
| | | NWYQQKPGKAPKLLIYYTSRLESGVPSRFSGSGSG |
| | | TDYTLTISSLQPEDFATYYCQQGNTLPWTFGQGTK |
| | | VEIKGGGGSGGGGSGGGGSEVQLVESGGGLVQPGG |
| | | SLRLSCAASGYSFTGYTMNWVRQAPGKGLEWVALI |
| | | NPYKGVSTYNQKFKDRFTISVDKSKNTAYLQMNSL |
| | | RAEDTAVYYCARSGYYGDSDWYFDVWGQGTLVTVS |
| | | STSGGGGSLESGQVLLESNIKVLPTWSTPVQPMAL |
| | | IVLGGVAGLLLFIGLGIFFCVRCRHRRRQAERMSQ |
| | | IKRLLSEKKTCQCPHRFQKTCSPI |

What is claimed is:

1. A Guanylate Cyclase 2C (GUCY2C) T cell-antigen coupler (GUCY2C-TAC) protein, comprising:
(a) a first polypeptide encoding an antigen-binding domain that binds GUCY2C;
(b) a second polypeptide encoding an antigen-binding domain that binds a protein associated with a TCR complex; and
(c) a third polypeptide encoding a TCR co-receptor cytosolic domain and transmembrane domain;
wherein components encoded by (a), components encoded by (b), and components encoded by (c) are fused directly to each other, or joined by at least one linker.

2. The GUCY2C-TAC protein of claim 1, wherein the first polynucleotide, the second polynucleotide, and the third polynucleotide are in order.

3. The GUCY2C-TAC protein of claim 1 or 2, wherein the antigen-binding domain that binds GUCY2C is a designed ankyrin repeat (DARPin) polypeptide, single chain variable fragment (scFv), single domain antibody, diabody, affibody, adnectin, affilin, phylomer; fynomer, affimer, peptide aptamer, knottin, centyrin, anticalin, or nanobody.

4. The GUCY2C-TAC protein of any one of claims 1-3, wherein the antigen-binding domain that binds GUCY2C is a designed ankyrin repeat (DARPin) polypeptide, a single chain variable fragment (scFv), or a nanobody.

5. The GUCY2C-TAC protein of any one of claims 1-4, wherein the antigen-binding domain that binds GUCY2C is a nanobody.

6. The GUCY2C-TAC protein of any one of claims 1-5, wherein the protein associated with the TCR complex is a CD3 protein.

7. The GUCY2C-TAC protein of claim 6, wherein the CD3 protein is a CD3γ protein, CD3δ protein and/or CD3ε protein. In some embodiments, the CD3 protein is a CD3ε protein.

8. The GUCY2C-TAC protein of claim 7, wherein the CD3 protein is a CD3ε protein.

9. The GUCY2C-TAC protein of any one of claims 1-8, wherein the antigen-binding domain that binds the protein associated with the TCR complex is a designed ankyrin repeat (DARPin) polypeptide, single chain variable fragment (scFv), single domain antibody, diabody, affibody, adnectin, affilin, phylomer; fynomer, affimer, peptide aptamer, knottin, centyrin, anticalin, or nanobody.

10. The GUCY2C-TAC protein of any one of claims 1-9, wherein the antigen-binding domain that binds the protein associated with the TCR complex is derived from an antibody selected from UCHT1 OKT3, F6A, and L2K.

11. The GUCY2C-TAC protein of claim 10, wherein the antigen-binding domain that binds the protein associated with the TCR complex is a UCHT1 antigen-binding domain.

12. The GUCY2C-TAC protein of claim 11, wherein the UCHT1 antigen-binding domain is an scFv of UCHT1.

13. The GUCY2C-TAC protein of claim 11 or 12, wherein the UCHT1 antigen-binding domain comprises a Y to T mutation at a position corresponding to amino acid 182 of SEQ ID NO: 32 (Y182T).

14. The GUCY2C-TAC protein of any one of claims 10-12, wherein the UCHT1 antigen-binding domain comprises a humanized variant of UCHT1 (huUCHT1).

15. The GUCY2C-TAC protein of claim 14, wherein the UCHT1 antigen-binding domain comprises a humanized variant of UCHT1 comprising a Y to T mutation at a position corresponding to amino acid 177 of SEQ ID NO: 40 (huUCHT1 (Y177T)).

16. The GUCY2C-TAC protein of any one of claims 10-12, wherein antigen-binding domain that binds the protein associated with the TCR complex comprises an amino acid sequence having at least 80%, at least 85%, at least 90%, at least 95%, at least 96%, at least 97%, at least 98%, at least 99%, or 100% sequence identity with SEQ ID NO: 32 (UCHT1), SEQ ID NO: 44 (UCHT1 (Y182T)), SEQ ID NO: 40 (huUCHT1), or SEQ ID NO: 42 (huUCHT1 (Y177T)).

17. The GUCY2C-TAC protein of any one of claims 10-12, wherein the CDR sequences of the antigen-binding domain that binds the protein associated with the TCR complex have 100% identity with the CDR sequences of the amino acid sequence of SEQ ID NO: 32 (UCHT1), SEQ ID NO: 44 (UCHT1 (Y182T)), SEQ ID NO: 40 (huUCHT1), or SEQ ID NO: 42 (huUCHT1 (Y177T)).

18. The GUCY2C-TAC protein of any one of claims 10-12, wherein the CDR sequences of the antigen-binding domain that binds the protein associated with the TCR complex have 100% identity with the CDR sequences of the amino acid sequence of SEQ ID NO: 32 (UCHT1), SEQ ID NO: 44 (UCHT1 (Y182T)), SEQ ID NO: 40 (huUCHT1), or SEQ ID NO: 42 (huUCHT1 (Y177T)), and the non-CDR sequences of the antigen-binding domain that binds the protein associated with the TCR complex have at least 80%, at least 85%, at least 90%, at least 95%, at least 96%, at least 97%, at least 98%, or at least 99% sequence identity with the non-CDR sequences of the amino acid sequence of SEQ ID NO: 32 (UCHT1), SEQ ID NO: 44 (UCHT1 (Y182T)), SEQ ID NO: 40 (huUCHT1), or SEQ ID NO: 42 (huUCHT1 (Y177T)).

19. The GUCY2C-TAC protein of claim 10, wherein the antigen-binding domain that binds the protein associated with the TCR complex is an OKT3 antigen-binding domain.

20. The GUCY2C-TAC protein of claim 19, wherein the antigen-binding domain that binds the protein associated with the TCR complex comprises an amino acid sequence having at least 80%, at least 85%, at least 90%, at least 95%, at least 96%, at least 97%, at least 98%, at least 99%, or 100% sequence identity with SEQ ID NO: 34 (OKT3).

21. The GUCY2C-TAC protein of claim 19 or 20, wherein the CDR sequences of the antigen-binding domain that binds the protein associated with the TCR complex have 100% identity with the CDR sequences of the amino acid sequence of SEQ ID NO: 34 (OKT3).

22. The GUCY2C-TAC protein of claim 19 or claim 20, wherein the CDR sequences of the antigen-binding domain that binds the protein associated with the TCR complex have 100% identity with the CDR sequences of the amino acid sequence of SEQ ID NO: 34 (OKT3), and the non-CDR sequences of the antigen-binding domain that binds the protein associated with the TCR complex have at least 80%, at least 85%, at least 90%, at least 95%, at least 96%, at least 97%, at least 98%, or at least 99% sequence identity with the non-CDR sequences of the amino acid sequence of SEQ ID NO: 34 (OKT3).

23. The GUCY2C-TAC protein of claim 10, wherein the antigen-binding domain that binds the protein associated with the TCR complex is a F6A antigen-binding domain.

24. The GUCY2C-TAC protein of claim 23, wherein the antigen-binding domain that binds the protein associated with the TCR complex comprises an amino acid sequence having at least 80%, at least 85%, at least 90%, at least 95%, at least 96%, at least 97%, at least 98%, at least 99%, or 100% sequence identity with SEQ ID NO: 36 (F6A).

25. The GUCY2C-TAC protein of claim 23 or 24, wherein the CDR sequences of the antigen-binding domain that binds the protein associated with the TCR complex have 100% identity with the CDR sequences of the amino acid sequence of SEQ ID NO: 36 (F6A).

26. The GUCY2C-TAC protein of claim 23 or claim 24, wherein the CDR sequences of the antigen-binding domain that binds the protein associated with the TCR complex have 100% identity with the CDR sequences of the amino acid sequence of SEQ ID NO: 36 (F6A), and the non-CDR sequences of the antigen-binding domain that binds the protein associated with the TCR complex have at least 80%, at least 85%, at least 90%, at least 95%, at least 96%, at least 97%, at least 98%, or at least 99% sequence identity with the non-CDR sequences of the amino acid sequence of SEQ ID NO: 36 (F6A).

27. The GUCY2C-TAC protein of claim 10, wherein the antigen-binding domain that binds the protein associated with the TCR complex is a L2K antigen-binding domain.

28. The GUCY2C-TAC protein of claim 27, wherein the antigen-binding domain that binds the protein associated with the TCR complex comprises an amino acid sequence having at least 80%, at least 85%, at least 90%, at least 95%, at least 96%, at least 97%, at least 98%, at least 99%, or 100% sequence identity with SEQ ID NO: 38 (L2K).

29. The GUCY2C-TAC protein of claim 27 or 28, wherein the CDR sequences of the antigen-binding domain that binds the protein associated with the TCR complex have 100% identity with the CDR sequences of the amino acid sequence of SEQ ID NO: 38 (L2K).

30. The GUCY2C-TAC protein of claim 27 or 28, wherein the CDR sequences of the antigen-binding domain that binds the protein associated with the TCR complex have 100% identity with the CDR sequences of the amino acid sequence of SEQ ID NO: 38 (L2K), and the non-CDR sequences of the antigen-binding domain that binds the protein associated with the TCR complex have at least 80%, at least 85%, at least 90%, at least 95%, at least 96%, at least 97%, at least 98%, or at least 99% sequence identity with the non-CDR sequences of the amino acid sequence of SEQ ID NO: 38 (L2K).

31. The GUCY2C-TAC protein of any one of claims 1-30, wherein the transmembrane domain is a CD4 transmembrane domain and the cytosolic domain is a CD4 cytosolic domain.

32. The GUCY2C-TAC protein of claim 31, wherein the transmembrane and cytosolic domain comprise an amino acid sequence having at least 80%, at least 85%, at least 90%, at least 95%, at least 96%, at least 97%, at least 98%, at least 99%, or 100% sequence identity with the amino acid sequence of SEQ ID NO: 46 (CD4 transmembrane and cytosolic domain).

33. The GUCY2C-TAC protein of any one of claims 1-32, wherein the transmembrane domain is a CD8 transmembrane domain and the cytosolic domain is a CD8 cytosolic domain.

34. The GUCY2C-TAC protein of any one of claims 1-33, wherein the component encoded by (a) and the component encoded by (c) are fused to the component encoded by (b).

35. The GUCY2C-TAC protein of any one of claims 1-33, wherein the component encoded by (b) and the component encoded by (c) are fused to the component encoded by (a).

36. The GUCY2C-TAC protein of any one of claims 1-35, wherein at least one linker joins the component encoded by (a) to the component encoded by (b).

37. The GUCY2C-TAC protein of claim 36, wherein the at least one linker is a glycine and/or serine-rich linker, a large protein domain, a long helix structure, or a short helix structure.

38. The GUCY2C-TAC protein of claim 36 or 37, wherein the at least one linker comprises an amino acid sequence having at least 80%, at least 85%, at least 90%, at least 95%, at least 96%, at least 97%, at least 98%, at least 99%, or 100% sequence identity with the amino acid sequence of SEQ ID NO: 26 ((G4S)4-based linker), SEQ ID NO: 28 (G4S-based linker), SEQ ID NO: 14 (CD4 based linker), SEQ ID NO: 12 (short helix connector), SEQ ID NO: 14 (long helix connector), SEQ ID NO: 16 (large domain connector), or SEQ ID NO: 24 ((G4S)3 flexible linker).

39. The GUCY2C-TAC protein of any one of claims 1-38, wherein the GUYC2C antigen binding domain is selected from an amino acid sequence according to any one of SEQ ID NOs: 53-127 or 514-521.

40. The GUCY2C-TAC protein of any one of claims 1-38, wherein the GUCY2C antigen-binding domain comprises a heavy chain variable region having an amino acid sequence having at least 80% sequence identity with an amino acid sequence according to any one of SEQ ID NOs: 128, 130, 132, 134, 136, 138, 140, 142, 144, 146, 148, 150, 152, 154, 156, 158, 160, 162, 164, 166, 168, 170, 172, 174, 176, 178, 180, 182, 184, 186, 188, 190, 192, 194, 196, 198, 200, and 202; and a light chain variable region having an amino acid sequence having at least 80% sequence identity with an amino acid sequence according to any one of SEQ ID NOs: 129, 131, 133, 135, 137, 139, 141, 143, 145, 147, 149, 151, 153, 155, 157, 159, 161, 163, 165, 167, 169, 171, 173, 175, 177, 179, 181, 183, 185, 187, 189, 191, 193, 195, 197, 199, 201, and 203.

41. The GUCY2C-TAC protein of any one of claims 1-38, wherein the GUYC2C antigen binding domain comprises a heavy chain variable region having an amino acid sequence according to any one of SEQ ID NOs: 128, 130, 132, 134, 136, 138, 140, 142, 144, 146, 148, 150, 152, 154, 156, 158, 160, 162, 164, 166, 168, 170, 172, 174, 176, 178, 180, 182, 184, 186, 188, 190, 192, 194, 196, 198, 200, and 202; and a light chain variable region having an amino acid sequence according to any one of SEQ ID NOs: 129, 131, 133, 135, 137, 139, 141, 143, 145, 147, 149, 151, 153, 155, 157, 159, 161, 163, 165, 167, 169, 171, 173, 175, 177, 179, 181, 183, 185, 187, 189, 191, 193, 195, 197, 199, 201, and 203.

42. The GUCY2C-TAC protein of any one of claims 1-38, wherein the GUCY2C antigen-binding domain comprises a heavy chain variable region comprising (a) a CDR1 having an amino acid selected from the group consisting of SEQ ID NO: 204, 210, 216, 222, 228, 234, 240, 246, 252, 258, 264, 270, 276, 282, 288, 294, 300, 306, 312, 318, 324, 330, 336, 342, 348, 354, 393, 399, 405, 411, 417, 423, 429, 435, 441, 447, 453, 459, 522, 525, 528, 531, 534, 537, 540, and 543, (b) a CDR2 having an amino acid selected from the group consisting of SEQ ID NO: 205, 211, 217, 223, 229, 235, 241, 247, 253, 259, 265, 271, 277, 283, 289, 295, 301, 307, 313, 319, 325, 331, 337, 343, 349, 355, 394, 400, 406, 412, 418, 424, 430, 436, 442, 448, 454, 460, 523, 526, 529, 532, 535, 538, 541, and 544, and (c) a CDR3 having an amino acid selected from the group consisting of SEQ ID NO: 206, 212, 218, 224, 230, 236, 242, 248, 254, 260, 266, 272, 278, 284, 290, 296, 302, 308, 314, 320, 326, 332, 338, 344, 350, 356, 395, 401, 407, 413, 419, 425, 431, 437, 443, 449, 455, 461, 524, 527, 530, 533, 536, 539, 542, and 545; and a light chain variable region comprising (a) a CDR1 having an amino acid selected from the group consisting of SEQ ID NO: 207, 213, 219, 225, 231, 237, 243, 249, 255, 261, 267, 273, 279, 285, 291, 297, 303, 309, 315, 321, 327, 333, 339, 345, 351, 357, 396, 402, 408, 414, 420, 426, 432, 438, 444, 450, 456 and 462, (b) a CDR2 having an amino acid selected from the group consisting of SEQ ID NO: 208, 214, 220, 226, 232, 238, 244, 250, 256, 262, 268, 274, 280, 286, 292, 298, 304, 310, 316, 322, 328, 334, 340, 346, 352, 358, 397, 403, 409, 415, 421, 427, 433, 439, 445, 451, 457 and 463, and (c) a CDR3 having an amino acid selected from the group consisting of SEQ ID NO: 209, 215, 221, 227, 233, 239, 245, 251, 257, 263, 269, 275, 281, 287, 293, 299, 305, 311, 317, 323, 329, 335, 341, 347, 353, 359, 398, 404, 410, 416, 422, 428, 434, 440, 446, 452, 458 and 464.

43. The GUCY2C-TAC protein of any one of claims 1-38, wherein the GUCY2C antigen-binding domain is a nanobody and comprises (a) a VHH CDR1 having an amino acid selected from the group consisting of SEQ ID NO: 360, 363, 366, 369, 372, 375, 378, 381, 384, 387, and 390; (b) a VHH CDR2 having an amino acid selected from the group consisting of SEQ ID NO: 361, 364, 367, 370, 373, 376, 379, 382, 385, 388, and 391; and (c) a VHH CDR3 having an amino acid selected from the group consisting of SEQ ID NO: 362, 365, 368, 371, 374, 377, 380, 383, 386, 389, and 392.

44. The GUCY2C-TAC protein of any one of claims 1-43, wherein the GUCY2C-TAC protein does not comprise a co-stimulatory domain.

45. The GUCY2C-TAC protein of any one of claims 1-44, wherein the GUCY2C-TAC protein does not comprise an activation domain.

46. The GUCY2C-TAC protein of any one of claims 1-45, wherein the GUCY2C-TAC protein further comprises a leader sequence.

47. The GUCY2C-TAC protein of claim 46, wherein the leader sequence comprises an amino acid sequence having at least 80%, at least 85%, at least 90%, at least 95%, at least 96%, at least 97%, at least 98%, at least 99%, or 100% sequence identity with the amino acid sequence of SEQ ID NO: 2 (muIgG leader), SEQ ID NO: 18 (huIgG leader), SEQ ID NO: 20 (huCD8a-1 leader) or SEQ ID NO: 30 (huCD8a-2 leader).

48. A GUCY2C TAC protein comprising an amino acid sequence having at least 80% sequence identity with the amino acid sequence of any one of SEQ ID NOs: 465-513, 546-590, or 686.

49. A GUCY2C TAC protein comprising an amino acid sequence according to the amino acid sequence of any one of SEQ ID NOs: 465-513, 546-590, or 686.

50. A nucleic acid sequence encoding the GUCY2C TAC protein of any one of claims 1-49.

51. The nucleic acid sequence of claim 50, wherein the nucleic acid sequence has at least 80% sequence identity with the nucleic acid sequence of any one of SEQ ID NOs: 591-685.

52. The nucleic acid sequence of claim 50, wherein the nucleic acid sequence comprises the nucleic acid sequence of any one of SEQ ID NOs: 591-685.

53. A T cell expressing the GUCY2C-TAC protein of any one of claims 1-49.

54. A T cell comprising the nucleic acid sequence of any one of claims 50-52.

55. A pharmaceutical composition comprising the T cell of claim 53 or 54, and a pharmaceutically acceptable excipient.

56. A method of treating a GUCY2C-expressing cancer in an individual in need thereof, comprising administering to the individual the pharmaceutical composition of claim 55.

57. The method of claim 56, wherein the cancer is a solid cancer.

58. The method of claim 56 or 57, wherein the cancer is a primary colorectal cancer, a primary gastric cancer, a primary gastroesophageal junction cancer, a primary esophageal cancer, or a primary pancreatic cancer.

59. The method of claim 56 or 57, wherein the cancer is a metastatic colorectal cancer, a metastatic gastric cancer, a metastatic gastroesophageal junction cancer, a metastatic esophageal cancer, or a metastatic pancreatic cancer.

The application's sequence listing, which the Patent Office published only in electronic form, follows.

SEQUENCE LISTING (686 sequences)

SEQ ID NO: 1 - DNA, 54 bp, Artificial Sequence
  Description of Artificial Sequence: Synthetic oligonucleotide
atggatttccaggtccagattttctccttcctgctgatttccgcaagcgtcatt

SEQ ID NO: 2 - protein, 18 aa, Artificial Sequence
  Description of Artificial Sequence: Synthetic peptide
MDFQVQIFSFLLISASVI

SEQ ID NO: 3 - DNA, 30 bp, Artificial Sequence
  Description of Artificial Sequence: Synthetic oligonucleotide
gaacagaaactgattagcgaagaagacctg

SEQ ID NO: 4 - protein, 10 aa, Artificial Sequence
  Description of Artificial Sequence: Synthetic peptide
EQKLISEEDL

SEQ ID NO: 5 - DNA, 27 bp, Artificial Sequence
  Description of Artificial Sequence: Synthetic oligonucleotide
actagtggcggaggaggatcactcgag

SEQ ID NO: 6 - protein, 9 aa, Artificial Sequence
  Description of Artificial Sequence: Synthetic peptide
TSGGGGSLE

SEQ ID NO: 7 - DNA, 75 bp, Artificial Sequence
  Description of Artificial Sequence: Synthetic oligonucleotide
aaccccgggggaggaggagggagcgggggaggaggcagcggcgggggaggctctggaggaggagggagcggatcc

SEQ ID NO: 8 - protein, 25 aa, Artificial Sequence
  Description of Artificial Sequence: Synthetic peptide
NPGGGGGSGGGGSGGGGSGGGGSGS

SEQ ID NO: 9 - DNA, 66 bp, Artificial Sequence
  Description of Artificial Sequence: Synthetic oligonucleotide
agcggacaggtgctgctggaatccaatatcaaagtcctgcccacttggtctacccccgtgcagcct

SEQ ID NO: 10 - protein, 22 aa, Artificial Sequence
  Description of Artificial Sequence: Synthetic peptide
SGQVLLESNIKVLPTWSTPVQP

SEQ ID NO: 11 - DNA, 51 bp, Artificial Sequence
  Description of Artificial Sequence: Synthetic oligonucleotide
gccgaagcagcagcaaaggaggccgcagcgaaggaagcagctgcgaaggcc

SEQ ID NO: 12 - protein, 17 aa, Artificial Sequence
  Description of Artificial Sequence: Synthetic peptide
AEAAAKEAAAKEAAAKA

SEQ ID NO: 13 - DNA, 81 bp, Artificial Sequence
  Description of Artificial Sequence: Synthetic oligonucleotide
gccgaggcagctgcaaaggaagctgcggcgaaggaggccgcagcgaaagaagcagcggcaaaagaagcagccgccaaagcc

SEQ ID NO: 14 - protein, 27 aa, Artificial Sequence
  Description of Artificial Sequence: Synthetic peptide
AEAAAKEAAAKEAAAKEAAAKEAAAKA

SEQ ID NO: 15 - DNA, 576 bp, Artificial Sequence
  Description of Artificial Sequence: Synthetic polynucleotide
atcgtagtgttggcatttcaaaaagcgtctagcatcgtctataagaaggaaggtgaacaagtcgagttttctttcccccttgcatttacggtggaaaagcttacgggtagcggcgagctgtggtggcaagctgaacgggcttcaagctcaaaatcttggattacttttgacttgaagaacaaagaggtgagtgtcaaaagagttactcaggacccaaagcttcaaatggggaagaaacttccgctgcacctgacgttgcctcaggccctgcctcaatatgccggctcaggcaatctgaccctcgcgctggaagctaagaccggaaaattgcaccaggaagtcaatttggttgtgatgcgcgccactcagctccaaaaaaatctcacttgcgaggtatgggggcctacgagcccaaaacttatgctgtctttgaagcttgaaaacaaggaagcgaaagtttctaagcgcgagaaagcggtatgggttttgaatcctgaggctggaatgtggcaatgcctcctgagcgatagcgggcaggtgctgttggagagcaacatcaaggttttgccagcagcc

SEQ ID NO: 16 - protein, 192 aa, Artificial Sequence
  Description of Artificial Sequence: Synthetic polypeptide
IVVLAFQKASSIVYKKEGEQVEFSFPLAFTVEKLTGSGELWWQAERASSSKSWITFDLKNKEVSVKRVTQDPKLQMGKKLPLHLTLPQALPQYAGSGNLTLALEAKTGKLHQEVNLVVMRATQLQKNLTCEVWGPTSPKLMLSLKLENKEAKVSKREKAVWVLNPEAGMWQCLLSDSGQVLLESNIKVLPAA

SEQ ID NO: 17 - DNA, 60 bp, Homo sapiens
atggagacccccgcccagctgctgttcctgctgctgctgtggctgcccgacaccaccggc

SEQ ID NO: 18 - protein, 20 aa, Homo sapiens
METPAQLLFLLLLWLPDTTG

SEQ ID NO: 19 - DNA, 63 bp, Homo sapiens
atggccctgccagtgaccgccctgctgctgccactggccctgctgctgcacgccgccagaccc

SEQ ID NO: 20 - protein, 21 aa, Homo sapiens
MALPVTALLLPLALLLHAARP

SEQ ID NO: 21 - DNA, 54 bp, Artificial Sequence
  Description of Artificial Sequence: Synthetic oligonucleotide
ggatctaccagcggatccggcaagcctggcagcggagagggatccacaaaggga

SEQ ID NO: 22 - protein, 18 aa, Artificial Sequence
  Description of Artificial Sequence: Synthetic peptide
GSTSGSGKPGSGEGSTKG

SEQ ID NO: 23 - DNA, 45 bp, Artificial Sequence
  Description of Artificial Sequence: Synthetic oligonucleotide
ggcggcggcggaagtggaggaggaggctcaggcggaggagggagc

SEQ ID NO: 24 - protein, 15 aa, Artificial Sequence
  Description of Artificial Sequence: Synthetic peptide
GGGGSGGGGSGGGGS

SEQ ID NO: 25 - DNA, 60 bp, Artificial Sequence
  Description of Artificial Sequence: Synthetic oligonucleotide
ggaggaggagggagcgggggaggaggcagcggcgggggaggctctggaggaggagggagc

SEQ ID NO: 26 - protein, 20 aa, Artificial Sequence
  Description of Artificial Sequence: Synthetic peptide
GGGGSGGGGSGGGGSGGGGS

SEQ ID NO: 27 - DNA, 15 bp, Artificial Sequence
  Description of Artificial Sequence: Synthetic oligonucleotide
ggaggaggagggagc

SEQ ID NO: 28 - protein, 5 aa, Artificial Sequence
  Description of Artificial Sequence: Synthetic peptide
GGGGS

SEQ ID NO: 29 - DNA, 63 bp, Homo sapiens
atggccctgccagtgaccgccctgctgctgccactggccctgctgctgcacgccgcccggcct

SEQ ID NO: 30 - protein, 21 aa, Homo sapiens
MALPVTALLLPLALLLHAARP

SEQ ID NO: 31 - DNA, 750 bp, Artificial Sequence
  Description of Artificial Sequence: Synthetic polynucleotide
atggacatccagatgactcagaccacaagctccctgtctgcaagtctgggcgaccgggtgacaatctcctgcagagcctctcaggatattaggaactacctgaattggtatcagcagaaacctgatggcacagtcaagctgctgatctactataccagccggctgcactcaggcgtgccaagcaaattctcaggaagcggctccgggactgactactccctgaccatctctaacctggagcaggaagatattgctacctatttctgccagcagggcaatacactgccctggacttttgccggaggcaccaaactggagatcaaggggggaggcgggagtggaggcgggggatcaggaggaggaggcagcggaggaggagggtccgaggtccagctgcagcagagcggaccagaactggtgaagcccggagcaagtatgaaaatctcctgtaaggcctcaggatacagcttcaccggctatacaatgaactgggtgaaacagtcccatggcaagaacctggaatggatggggctgattaatccttacaaaggcgtcagcacctataatcagaagtttaaagacaaggccacactgactgtggataagtctagttcaaccgcttacatggagctgctgtccctgacatctgaagacagtgccgtgtactattgtgctcggtctggctactatggggacagtgattggtacttcgatgtctggggacagggcactaccctgaccgtgttttct

SEQ ID NO: 32 - protein, 250 aa, Artificial Sequence
  Description of Artificial Sequence: Synthetic polypeptide
MDIQMTQTTSSLSASLGDRVTISCRASQDIRNYLNWYQQKPDGTVKLLIYYTSRLHSGVPSKFSGSGSGTDYSLTISNLEQEDIATYFCQQGNTLPWTFAGGTKLEIKGGGGSGGGGSGGGGSGGGGSEVQLQQSGPELVKPGASMKISCKASGYSFTGYTMNWVKQSHGKNLEWMGLINPYKGVSTYNQKFKDKATLTVDKSSSTAYMELLSLTSEDSAVYYCARSGYYGDSDWYFDVWGQGTTLTVFS

SEQ ID NO: 33 - DNA, 769 bp, Artificial Sequence
  Description of Artificial Sequence: Synthetic polynucleotide
atggccgacatcgtgctgacacagagccccgccatcatgtctgccagccctggcgagaaagtgaccatgacctgtagcgccagcagcagcgtgtcctacatgaactggtatcagcagaagtccggcaccagccccaagcggtggatctacgacacaagcaagctggcctctggcgtgcccgcccactttagaggctctggcagcggcacaagctacagcctgaccatcagcggcatggaagccgaggatgccgccacctactactgccagcagtggtccagcaaccccttcacctttggctccggcacaaagctggaaatcaaccgggccgacaccgcccctacaggcggcggaggatctggcggaggcggatctgggggcggaggaagtggggggggaggatctatggctcaggtgcagctgcagcagtctggcgccgaactggctagacctggcgcctccgtgaagatgagctgcaaggccagcggctacaccttcacccggtacaccatgcactgggtcaagcagaggcctggacagggcctggaatggatcggctacatcaaccccagccggggctacaccaactacaaccagaagttcaaggacaaggccaccctgaccaccgacaagagcagcagcaccgcctacatgcagctgtcctccctgaccagcgaggacagcgccgtgtactactgcgcccggtactacgacgaccactactccctggactactggggccagggcaccacactgaccgtgtctagta

SEQ ID NO: 34 - protein, 256 aa, Artificial Sequence
  Description of Artificial Sequence: Synthetic polypeptide
MADIVLTQSPAIMSASPGEKVTMTCSASSSVSYMNWYQQKSGTSPKRWIYDTSKLASGVPAHFRGSGSGTSYSLTISGMEAEDAATYYCQQWSSNPFTFGSGTKLEINRADTAPTGGGGSGGGGSGGGGSGGGGSMAQVQLQQSGAELARPGASVKMSCKASGYTFTRYTMHWVKQRPGQGLEWIGYINPSRGYTNYNQKFKDKATLTTDKSSSTAYMQLSSLTSEDSAVYYCARYYDDHYSLDYWGQGTTLTVSS

SEQ ID NO: 35 - DNA, 747 bp, Artificial Sequence
  Description of Artificial Sequence: Synthetic polynucleotide
cagaccgtggtgacccaggagcccagcctgaccgtgagccccggcggcaccgtgaccctgacctgcggcagcagcaccggcgccgtgaccagcggctactaccccaactgggtgcagcagaagcccggccaggcccccaggggcctgatcggcggcaccaagttcctggcccccggcacccccgccaggttcagcggcagcctgctgggcggcaaggccgccctgaccctgagcggcgtgcagcccgaggacgaggccgagtactactgcgccctgtggtacagcaacaggtgggtgttcggcggcggcaccaagctgaccgtgctgggcggcggcggcagcggcggcggcggcagcggcggcggcggcagcgaggtgcagctgctggagagcggcggcggcctggtgcagcccggcggcagcctgaagctgagctgcgccgccagcggcttcaccttcaacatctacgccatgaactgggtgaggcaggcccccggcaagggcctggagtgggtggccaggatcaggagcaagtacaacaactacgccacctactacgccgacagcgtgaagagcaggttcaccatcagcagggacgacagcaagaacaccgcctacctgcagatgaacaacctgaagaccgaggacaccgccgtgtactactgcgtgaggcacggcaacttcggcaacagctacgtgagcttcttcgcctactggggccagggcaccctggtgaccgtgagcagc

SEQ ID NO: 36 - protein, 249 aa, Artificial Sequence
  Description of Artificial Sequence: Synthetic polypeptide
QTVVTQEPSLTVSPGGTVTLTCGSSTGAVTSGYYPNWVQQKPGQAPRGLIGGTKFLAPGTPARFSGSLLGGKAALTLSGVQPEDEAEYYCALWYSNRWVFGGGTKLTVLGGGGSGGGGSGGGGSEVQLLESGGGLVQPGGSLKLSCAASGFTFNIYAMNWVRQAPGKGLEWVARIRSKYNNYATYYADSVKSRFTISRDDSKNTAYLQMNNLKTEDTAVYYCVRHGNFGNSYVSFFAYWGQGTLVTVSS

SEQ ID NO: 37 - DNA, 720 bp, Artificial Sequence
  Description of Artificial Sequence: Synthetic polynucleotide
gacatccagctgacccagagccccgccatcatgagcgccagccccggcgagaaggtgaccatgacctgcagggccagcagcagcgtgagctacatgaactggtaccagcagaagagcggcaccagccccaagaggtggatctacgacaccagcaaggtggccagcggcgtgccctacaggttcagcggcagcggcagcggcaccagctacagcctgaccatcagcagcatggaggccgaggacgccgccacctactactgccagcagtggagcagcaaccccctgaccttcggcgccggcaccaagctggagctgaagggcggcggcggcagcggcggcggcggcagcggcggcggcggcagcgacatcaagctgcagcagagcggcgccgagctggccaggcccggcgccagcgtgaagatgagctgcaagaccagcggctacaccttcaccaggtacaccatgcactgggtgaagcagaggcccggccagggcctggagtggatcggctacatcaaccccagcaggggctacaccaactacaaccagaagttcaaggacaaggccaccctgaccaccgacaagagcagcagcaccgcctacatgcagctgagcagcctgaccagcgaggacagcgccgtgtactactgcgccaggtactacgacgaccactactgcctggactactggggccagggcaccaccctgaccgtgagcagc

SEQ ID NO: 38 - protein, 240 aa, Artificial Sequence
  Description of Artificial Sequence: Synthetic polypeptide
DIQLTQSPAIMSASPGEKVTMTCRASSSVSYMNWYQQKSGTSPKRWIYDTSKVASGVPYRFSGSGSGTSYSLTISSMEAEDAATYYCQQWSSNPLTFGAGTKLELKGGGGSGGGGSGGGGSDIKLQQSGAELARPGASVKMSCKTSGYTFTRYTMHWVKQRPGQGLEWIGYINPSRGYTNYNQKFKDKATLTTDKSSSTAYMQLSSLTSEDSAVYYCARYYDDHYCLDYWGQGTTLTVSS

SEQ ID NO: 39 - DNA, 735 bp, Artificial Sequence
  Description of Artificial Sequence: Synthetic polynucleotide
atggatatccagatgacccagtccccgagctccctgtccgcctctgtgggcgatagggtcaccatcacctgccgtgccagtcaggacatccgtaattatctgaactggtatcaacagaaaccaggaaaagctccgaaactactgatttactatacctcccgcctggagtctggagtcccttctcgcttctctggttctggttctgggacggattacactctgaccatcagcagtctgcaaccggaagacttcgcaacttattactgtcagcaaggtaatactctgccgtggacgttcggacagggcaccaaggtggagatcaaaggcggcggcggaagtggaggaggaggctcaggcggaggagggagcgaggttcagctggtggagtctggcggtggcctggtgcagccagggggctcactccgtttgtcctgtgcagcttctggctactcctttaccggctacactatgaactgggtgcgtcaggccccaggtaagggcctggaatgggttgcactgattaatccttataaaggtgttagtacctacaaccagaagttcaaggaccgtttcactataagcgtagataaatccaaaaacacagcctacctgcaaatgaacagcctgcgtgctgaggacactgccgtctattattgtgctagaagcggatactacggcgatagtgactggtattttgacgtgtggggtcaaggaaccctggtcaccgtctcctcg

SEQ ID NO: 40 - protein, 245 aa, Artificial Sequence
  Description of Artificial Sequence: Synthetic polypeptide
MDIQMTQSPSSLSASVGDRVTITCRASQDIRNYLNWYQQKPGKAPKLLIYYTSRLESGVPSRFSGSGSGTDYTLTISSLQPEDFATYYCQQGNTLPWTFGQGTKVEIKGGGGSGGGGSGGGGSEVQLVESGGGLVQPGGSLRLSCAASGYSFTGYTMNWVRQAPGKGLEWVALINPYKGVSTYNQKFKDRFTISVDKSKNTAYLQMNSLRAEDTAVYYCARSGYYGDSDWYFDVWGQGTLVTVSS

SEQ ID NO: 41 - DNA, 735 bp, Artificial Sequence
  Description of Artificial Sequence: Synthetic polynucleotide
atggatatccagatgacccagtccccgagctccctgtccgcctctgtgggcgatagggtcaccatcacctgccgtgccagtcaggacatccgtaattatctgaactggtatcaacagaaaccaggaaaagctccgaaactactgatttactatacctcccgcctggagtctggagtcccttctcgcttctctggttctggttctgggacggattacactctgaccatcagcagtctgcaaccggaagacttcgcaacttattactgtcagcaaggtaatactctgccgtggacgttcggacagggcaccaaggtggagatcaaaggcggcggcggaagtggaggaggaggctcaggcggaggagggagcgaggttcagctggtggagtctggcggtggcctggtgcagccagggggctcactccgtttgtcctgtgcagcttctggctactcctttaccggctacactatgaactgggtgcgtcaggccccaggtaagggcctggaatgggttgcactgattaatcctaccaaaggtgttagtacctacaaccagaagttcaaggaccgtttcactataagcgtagataaatccaaaaacacagcctacctgcaaatgaacagcctgcgtgctgaggacactgccgtctattattgtgctagaagcggatactacggcgatagtgactggtattttgacgtgtggggtcaaggaaccctggtcaccgtctcctcg

SEQ ID NO: 42 - protein, 245 aa, Artificial Sequence
  Description of Artificial Sequence: Synthetic polypeptide
MDIQMTQSPSSLSASVGDRVTITCRASQDIRNYLNWYQQKPGKAPKLLIYYTSRLESGVPSRFSGSGSGTDYTLTISSLQPEDFATYYCQQGNTLPWTFGQGTKVEIKGGGGSGGGGSGGGGSEVQLVESGGGLVQPGGSLRLSCAASGYSFTGYTMNWVRQAPGKGLEWVALINPTKGVSTYNQKFKDRFTISVDKSKNTAYLQMNSLRAEDTAVYYCARSGYYGDSDWYFDVWGQGTLVTVSS

SEQ ID NO: 43 - DNA, 750 bp, Artificial Sequence
  Description of Artificial Sequence: Synthetic polynucleotide
atggacatccagatgactcagaccacaagctccctgtctgcaagtctgggcgaccgggtgacaatctcctgcagagcctctcaggatattaggaactacctgaattggtatcagcagaaacctgatggcacagtcaagctgctgatctactataccagccggctgcactcaggcgtgccaagcaaattctcaggaagcggctccgggactgactactccctgaccatctctaacctggagcaggaagatattgctacctatttctgccagcagggcaatacactgccctggacttttgccggaggcaccaaactggagatcaaggggggaggcgggagtggaggcgggggatcaggaggaggaggcagcggaggaggagggtccgaggtccagctgcagcagagcggaccagaactggtgaagcccggagcaagtatgaaaatctcctgtaaggcctcaggatacagcttcaccggctatacaatgaactgggtgaaacagtcccatggcaagaacctggaatggatggggctgattaatcctaccaaaggcgtcagcacctataatcagaagtttaaagacaaggccacactgactgtggataagtctagttcaaccgcttacatggagctgctgtccctgacatctgaagacagtgccgtgtactattgtgctcggtctggctactatggggacagtgattggtacttcgatgtctggggacagggcactaccctgaccgtgttttct

SEQ ID NO: 44 - protein, 250 aa, Artificial Sequence
  Description of Artificial Sequence: Synthetic polypeptide
MDIQMTQTTSSLSASLGDRVTISCRASQDIRNYLNWYQQKPDGTVKLLIYYTSRLHSGVPSKFSGSGSGTDYSLTISNLEQEDIATYFCQQGNTLPWTFAGGTKLEIKGGGGSGGGGSGGGGSGGGGSEVQLQQSGPELVKPGASMKISCKASGYSFTGYTMNWVKQSHGKNLEWMGLINPTKGVSTYNQKFKDKATLTVDKSSSTAYMELLSLTSEDSAVYYCARSGYYGDSDWYFDVWGQGTTLTVFS

SEQ ID NO: 45 - DNA, 252 bp, Artificial Sequence
  Description of Artificial Sequence: Synthetic polynucleotide
agcggacaggtgctgctggaatccaatatcaaagtcctgcccacttggtctacccccgtgcagcctatggctctgattgtgctgggaggagtcgcaggactgctgctgtttatcgggctgggaattttcttttgcgtgcgctgccggcaccggagaaggcaggccgagcgcatgagccagatcaagcgactgctgagcgagaagaaaacctgtcagtgtccccatagattccagaagacctgttcacccatt

SEQ ID NO: 46 - protein, 84 aa, Artificial Sequence
  Description of Artificial Sequence: Synthetic polypeptide
SGQVLLESNIKVLPTWSTPVQPMALIVLGGVAGLLLFIGLGIFFCVRCRHRRRQAERMSQIKRLLSEKKTCQCPHRFQKTCSPI

SEQ ID NO: 47 - DNA, 237 bp, Artificial Sequence
  Description of Artificial Sequence: Synthetic polynucleotide
ctcgagctgaggcccgaggcttctagacctgctgccggcggagccgtgcacaccagaggcctggacttcgccagcgacatctacatctgggcccctctggccggcacctgtggcgtgctgctgctgagcctggtcatcaccctgtactgcaaccaccggaaccggcggagagtgtgcaagtgccccagacccgtggtcaagagcggcgacaagcccagcctgagcgccagatacgtg

SEQ ID NO: 48 - protein, 79 aa, Artificial Sequence
  Description of Artificial Sequence: Synthetic polypeptide
LELRPEASRPAAGGAVHTRGLDFASDIYIWAPLAGTCGVLLLSLVITLYCNHRNRRRVCKCPRPVVKSGDKPSLSARYV

SEQ ID NO: 49 - DNA, 234 bp, Artificial Sequence
  Description of Artificial Sequence: Synthetic polynucleotide
ctcgagctgaggcccgaggcttctagacctgctgccggcggagccgtgcacaccagaggcctggacttcgccagcgacatctacatctgggcccctctggccggcacctgtggcgtgctgctgctgagcctggtcatcaccctgtacctgtgctgcagacggcggagagtgtgcaagtgccccagacccgtggtcaagagcggcgacaagcccagcctgagcgccagatacgtg

SEQ ID NO: 50 - protein, 78 aa, Artificial Sequence
  Description of Artificial Sequence: Synthetic polypeptide
LELRPEASRPAAGGAVHTRGLDFASDIYIWAPLAGTCGVLLLSLVITLYLCCRRRRVCKCPRPVVKSGDKPSLSARYV

SEQ ID NO: 51 - DNA, 213 bp, Artificial Sequence
  Description of Artificial Sequence: Synthetic polynucleotide
ctcgagaagaagtccaccctgaagaaacgggtgtcccggctgcccagacccgagacacagaagggccccctgagcagccctatcaccctgggactgctggtggccggcgtgctggtgctgctggtgtctctgggagtggccatccacctgtgctgccggcggagaagggcctgcaagtgccccagactgcggttcatgaagcagttctacaag

SEQ ID NO: 52 - protein, 71 aa, Artificial Sequence
  Description of Artificial Sequence: Synthetic polypeptide
LEKKSTLKKRVSRLPRPETQKGPLSSPITLGLLVAGVLVLLVSLGVAIHLCCRRRRACKCPRLRFMKQFYK

SEQ ID NO: 53 - protein, 251 aa, Artificial Sequence
  Description of Artificial Sequence: Synthetic polypeptide
QVQLVQSGAEVKKPGSSVKVSCKASGGTFSSYAISWVRQAPGQGLEWMGGIIPIFGTANYAQKFQGRVTITADESTSTAYMELSSLRSEDTAVYYCARDILRLSVSSGMDVWGQGTLVTVSSGGGSEGGGSEGGGSEGGGQSVLTQPPSASGTPGQRVTISCSGGSSNIGSNYVYWYQQLPGTAPKLLIYRNNQRPSGVPDRFSGSKSGTSASLAISGLRSEDEADYYCAAWDDSLSGHVVFGGGTKLTVL

SEQ ID NO: 54 - protein, 250 aa, Artificial Sequence
  Description of Artificial Sequence: Synthetic polypeptide
QVQLVQSGAEVKKPGSSVKVSCKASGGTFSSYAISWVRQAPGQGLEWMGGIIPIFGTANYAQKFQGRVTITADESTSTAYMELSSLRSEDTAVYYCARDILRLSVSSGMDVWGQGTLVTVSSGGGSEGGGSEGGGSEGGGQSVLTQPPSASGTPGQRVTISCSGSSSNIGSNYVYWYQQLPGTAPKLLIYRNNQRPSGVPDRLSGSKSGTSASLAISGLRSEDEADYYCAAWDDSLSAVVFGGGTKLTVL

SEQ ID NO: 55 - protein, 251 aa, Artificial Sequence
  Description of Artificial Sequence: Synthetic polypeptide
QVQLQESGGGVVQPGRSLRLSCAASGFTLSSYGMHWVRQAPGKGLEWVAVISYDGSNKYYADSVKGRFTISRDNSKNTLYLQMNSLRAEDTAVYYCAKSGWRYYYYYGMDVWGQGTLVTVSSGGGSEGGGSEGGGSEGGGQSVLTQPPSVSGAPGQRVTISCTGSSSNIGAGYDVHWYQQLPGTAPKLLIYGNSNRPSGVPDRFSGSKSGTSASLAITGLQAEDEADYYCQSYDSSLSGSVFGGGTKLTVL

SEQ ID NO: 56 - protein, 252 aa, Artificial Sequence
  Description of Artificial Sequence: Synthetic polypeptide
QVQLVQSGAEVKKPGSSVKVSCKASGGTFSSYAISWVRQAPGQGLEWMGGIIPIFGTANYAQKFQGRVTITADESTSTAYMELSSLRSEDTAVYYCARDILRLSVSSGMDVWGQGTMVTVSSGGGSEGGGSEGGGSEGGGQSVLTQPPSASGTPGQRVTISCSGSSSNIGSNYVYWYQQLPGTAPKLLIYRNNQRPSGVPDRFSGSKSGTSASLAISGLRSEDEADYYCAAWDDSLSGPSVVFGGGTKLTVL

SEQ ID NO: 57 - protein, 251 aa, Artificial Sequence
  Description of Artificial Sequence: Synthetic polypeptide
QVQLVQSGAEVKKPGASVKVSCKASGYTFTSYGISWVRQAPGQGLEWMGWIGAYNGNTNYAQKLQGRVTMTTDTSTSTAYMELRSLRSDDTAVYYCARDLRRYSSSWDGPGYWGQGTLVTVSSGGGSEGGGSEGGGSEGGGQSALTQPASVSGSPGQSITISCTGTSSDVGGYNYVSWYQQHPGKAPKLMIYDVSNRPSGVSNRFSGSKSGNTASLTISGLQAEDEADYYCSSYTSSSTRVFGTGTKLTVL

SEQ ID NO: 58 - protein, 250 aa, Artificial Sequence
  Description of Artificial Sequence: Synthetic polypeptide
QVQLVQSGAEVKKPGSSVKVSCKASGGTFSSYAISWVRQAPGQGLEWMGGIIPIFGTANYAQKFQGRVTITADESTSTAYMELSSLRSEDTAVYYCARDILRLSVSSGMDVWGQGTLVTVSSGGGSEGGGSEGGGSEGGGSYVLTQPPSASGTPGQRVTISCSGSSSNIGGNYVYWYQQLPGTAPKLLIYRNNQRPSGVPDRFSGSKSGTSASLAISGLRSEDEADYYCAAWDDSLSGWVFGGGTKLTVL

SEQ ID NO: 59 - protein, 252 aa, Artificial Sequence
  Description of Artificial Sequence: Synthetic polypeptide
QVQLVQSGAEVKKPGSSVKVSCKASGGTFSSYAISWVRQAPGQGLEWMGGIIPIFGTANYAQKFQGRVTITADKSTSTAYMELSSLRSEDTAVYYCARDGGRYSYGRSFDYWGQGTLVTVSSGGGSEGGGSEGGGSEGGGQSVLTQPPSVSGAPGQRVTISCTGSSSNIGAGYDVHWYQQLPGTAPKLLIYGNSNRPSGVPDRFSGSKSGTSASLAITGLQAEDEADYYCQSYDSSLSGPVVFGGGTKLTVL

SEQ ID NO: 60 - protein, 249 aa, Artificial Sequence
  Description of Artificial Sequence: Synthetic polypeptide
QVQLVQSGAEVKKPGSSVKVSCKASGGTFSSYAISWVRQAPGQGLEWMGGIIPIFGTANYAQKFQGRVTITADESTSTAYMELSSLRSEDTAVYYCARPLRPLHYYGMDVWGQGTLVTVSSGGGSEGGGSEGGGSEGGGQSVLTQPPSASGTPGQRVTISCSGSSSNIGSNYVYWYQQLPGTAPKLLIYRNNQRPSGVPDRFSGSKSGTSASLAISGLRSEDEADYYCAAWDDSLTEGVFGGGTKLTVL

SEQ ID NO: 61 - protein, 250 aa, Artificial Sequence
  Description of Artificial Sequence: Synthetic polypeptide
QVQLVESGGGVVQPGRSLRLSCAASGFTFSSYGMHWVRRAPGKGLEWVAVISYDGSNKYYADSVKGRFTISRDNSKNTLYLQMNSLRAEDTAVYYCAKDGGDSGSLDYWGQGTLVTVSSGGGSEGGGSEGGGSEGGGDIVMTQSPDSLAVSLGERATINCKSSQSVLYSSNNKNYLAWYQQKPGQPPKLLIYWASTRESGVPDRFSGSGSGTDFTLTISSLQAEDVAVYYCQQYYSTPLTFGGGTKLEIK

SEQ ID NO: 62 - protein, 245 aa, Artificial Sequence
  Description of Artificial Sequence: Synthetic polypeptide
EVQLLESGGGLVQPGGSLRLSCAASGFTFSSYWMSWVRQAPGKGLEWVANIKQDGSEKYYVDSVKGRFTISRDNAKNSLYLQMNSLRAEDTAVYYCARPAGQLLYGMDVWGQGTLVTVSSGGGSEGGGSEGGGSEGGGSYVLTQPPSVSVSPGQTARITCSGDALPKQYAYWYQQKPGQAPVLVIYKDSERPSGIPERFSGSSSGTTVTLTISGVQAEDEADYYCQSADSSGTWVFGGGTKLTVL

SEQ ID NO: 63 - protein, 250 aa, Artificial Sequence
  Description of Artificial Sequence: Synthetic polypeptide
EVQLLESGGGVVQPGRSLRLSCAASGFTFSSYGMHWVRQAPGKGLEWVAVISYDGSNKYYADSVKGRFTISRDNSKNTLYLQMNSLRAEDTAVYYCAKDAADMGAFDYWGQGTLVTVSSGGGSEGGGSEGGGSEGGGDIQMTQSPDSLAVSLGERATMNCKSSQSVLYSSNNKNYLAWYQQKPGQPPKLLIYWASARESGVPDRFSGSGSGTDFTLTISSLQAEDVAVYYCQQYYSTPLTFGQGTKVEIK

SEQ ID NO: 64 - protein, 250 aa, Artificial Sequence
  Description of Artificial Sequence: Synthetic polypeptide
EVQLLESGGGLVKPGGSLRLSCAASGFTFSSYSMNWVRQAPGKGLEWVSAISGSGGSTYYADSVKGRFTISRDNSKNTLYLQMNSLRAEDTAVYYCARARGYSYGSDAFDIWGQGTMVTVSSGGGSEGGGSEGGGSEGGGQSVLTQPPSASGTPGQRVTISCSGSSSNIGSNYVYWYQQLPGTAPKLLIYRNNQRPSGVPDRFSGSKSGTSASLAISGLRSEDEADYYCAAWDDSLSGVVFGGGTKLTVL

SEQ ID NO: 65 - protein, 251 aa, Artificial Sequence
  Description of Artificial Sequence: Synthetic polypeptide
QVQLVQSGGGVVQPGRSLRLSCAASGFTFSSYGMHWVRQAPGKGLEWVAVISYDGSNKYYADSVKGRFTISRDNSKNTLYLQMNSLRAEDTAVYYCAKGVPRYYYYYGMDVWGQGTMVTVSSGGGSEGGGSEGGGSEGGGQSVLTQPPSVSGAPGQRVTISCTGSSSNIGAGYDVHWYQQLPGTAPKLLIYGNSNRPSGVPDRFSGSKSGTSASLAITGLQAEDEADYYCQSYDSSLSGSVFGGGTKLTVL

SEQ ID NO: 66 - protein, 254 aa, Artificial Sequence
  Description of Artificial Sequence: Synthetic polypeptide
EVQLVQSGAEVKKPGSSVKVSCKASGGTFSSYAISWVRQAPGQGLEWMGGIIPIFGTANYAQKFQGRVTITADESTSTAYMELSSLRSEDTAVYYCARDRGRRYCSGGSCPNAFDIWGQGTMVTVSSGGGSEGGGSEGGGSEGGGEIVLTQSPATLSVSPGERATLSCRASQSVSSNLAWYQQKPGQAPRLLIYGASTRATGIPARFSGSGSGTEFTLTISSLQSEDFAVYYCQQYNNWPPALTFGGGTKVEIK

SEQ ID NO: 67 - protein, 254 aa, Artificial Sequence
  Description of Artificial Sequence: Synthetic polypeptide
QVQLVQSGAEVKKPGSSVKVSCKASGGTFSSYAISWVRQAPGQGLEWMGGIIPIFGTANYAQKFQGRVTITADESTSTAYMELSSLRSEDTAVYYCARGGYVWGSYRQNSNWFDPWGQGTLVTVSSGGGSEGGGSEGGGSEGGGSYVLTQPPSASGTPGQRVTISCSGSSSNIGSNYVYWYQQLPGTAPKLLIYRNNQRPSGVPDRFSGSKSGTSASLAISGLRSEDEADYYCAAWDDSLSGWVFGGGTKLTVL

SEQ ID NO: 68 - protein, 250 aa, Artificial Sequence
  Description of Artificial Sequence: Synthetic polypeptide
QVQLVESGAEVKKPGSSVKVSCKASGGTFSSYAISWVRQAPGQGLEWMGGIIPIFGTANYAQKFQGRVTITADESTSTAYMELSSLRSEDTAVYYCARDILRLSVSSGMDVWGQGTLVTVSSGGGSEGGGSEGGGSEGGGQSVLTQPPSASGTPGRRVTISCSGSSSNIGSNYVYWYQQLPGTAPKLLIYRNNQRPSGVPDRFSGSKSGTSASLAISGLRSEDEADYYCAAWDDSLSGVVFGGGTKLTVL

SEQ ID NO: 69 - protein, 246 aa, Artificial Sequence
  Description of Artificial Sequence: Synthetic polypeptide
QVQLVESGGGLVQPGGSLRLSCAASGFTFSSYWMSWVRQAPGKGLEWVANIKQDGSEKYYVDSVKGRFTISRDNAKNSLYLQMNSLRAEDTAVYYCARWSHYYDSSGLDYWGQGTLVTVSSGGGSEGGGSEGGGSEGGGSYVLTQPPSVSVSPGQTARITCSGDALPKQYAYWYQQKPGQAPVLVIYKDSERPSGIPERFSGSSSGTTVTLTISGVQAEDEADYYCQSADSSGTWVFGGGTKLTVL

SEQ ID NO: 70 - protein, 253 aa, Artificial Sequence
  Description of Artificial Sequence: Synthetic polypeptide
QVQLVESGAEVKKPGSSVKVSCKASGGTFSSYAISWVRQAPGQGLEWMGGIIPIFGTANYAQKFQGRVTITADKSTSTAYMELSSLRSEDTAVYYCARTHLPYSYGLGGFDYWGQGTLVTVSSGGGSEGGGSEGGGSEGGGQSVLTQPPSVSGAPGQRVTISCTGSSSNIGAGYDVHWYQQLPGTAPKLLIYGNSNRPSGVPDRFSGSKSGTSASLAITGLQAEDEADYYCQSYDSSLSGPVVFGGGTKVTVL

SEQ ID NO: 71 - protein, 255 aa, Artificial Sequence
  Description of Artificial Sequence: Synthetic polypeptide
EVQLVQSGAEVKKPGSSVKVSCKASGGTFSSYAISWVRQAPGQGLEWMGGIIPIFGTANYAQKFQGRVTITADESTSTAYMELSSLRSEDTAVYYCARDPSRDYYGSGRFSWFDPWGQGTLVTVSSGGGSEGGGSEGGGSEGGGQSVLTQPPSASGTPGQRVTISCSGSSSNIGSNYVYWYQQLPGTAPKLLIYRNNQRPSGVPDRFSGSKSGTSASLAISGLRSEDEADYYCAAWDDSLSGRGVFGGGTKLTVL

SEQ ID NO: 72 - protein, 255 aa, Artificial Sequence
  Description of Artificial Sequence: Synthetic polypeptide
QVQLVQSGAEVKKPGASVKVSCKASGYTFTSYGISWVRQAPGQGLEWMGWISAYNGNTNYAQKLQGRVTMTTDTSTSTAYMELRSLRSDDTAVYYCARDIIRYCSSTSCYRGIDYWGQGTLVTVSSGGGSEGGGSEGGGSEGGGQSALTQPASVSGSPGQSITISCTGTSSDVGGYNYVSWYQQHPGKAPKLMIYDVSNRPSGVSNRFSGSKSGNTASLTISGLQAEDEADYYCSSYTSSSPHVVSGGGTKLTVL

SEQ ID NO: 73 - protein, 251 aa, Artificial Sequence
  Description of Artificial Sequence: Synthetic polypeptide
QVQLVESGGGVVQPGRSLRLSCAASGFTFSSYGMHWVRQAPGKGLEWVAVISYDGSNKYYADSVKGRFTISRDNSKNTLYLQMNSLRAEDTAVYYCARDGTDYRGAFDIWGQGTMVTVSSGGGSEGGGSEGGGSEGGGDIQLTQSPDSLAVPLGERATINCKSSQSVLYSSNNKNYLAWYQQKPGQPPKLLIYWASTRESGVPDRFSGSGSGTDFTLTISSLQAEDVAVYYCQQYYSTPLTFGQGTKLEIK

SEQ ID NO: 74 - protein, 251 aa, Artificial Sequence
  Description of Artificial Sequence: Synthetic polypeptide
EVQLVQSGAEVKKPGSSVRVSCKASGGTFSSYAISWVRQAPGQGLEWMGGIIPIFGTANYAQKFQGRVTITADKSTSTAYMELSSLRSEDTAVYYCARGGGRWLHSRLDVWGQGTTVTVSSGGGSEGGGSEGGGSEGGGQSVLTQPPSVSGAPGQRVTISCTGSSSNIGAGYDVHWYQQFPGTAPKLLIFGNNNRPSGVPDRFSGSKSGTSASLAITGLQAEDEANYYCQSYDRSLSGPVVFGGGTKLTVL

SEQ ID NO: 75 - protein, 250 aa, Artificial Sequence
  Description of Artificial Sequence: Synthetic polypeptide
EVQLVESGGGVVQPGRSLRLSCAASGFTFSSYGMHWVRQAPGKGLEWVAVISYDGSNKYYADSVKGRFTISRDNSKNTLYLQMNSLRAEDTAVYYCAKDAGDLGAFDIWGQGTMVTVSSGGGSEGGGSEGGGSEGGGDIVMTQSPDSLAVSLGERATINCKSSQSVLYSSNNKNYLAWYQQKPGQPPKLLIYWASTRESGVPDRFSGSGSGTDFTLTISSLQAEDVAVYYCQQYYSTPLTFGPGTKVEIK

SEQ ID NO: 76 - protein, 252 aa, Artificial Sequence
  Description of Artificial Sequence: Synthetic polypeptide
QVQLVQSGGGVVQPGRSLRLSCAASGFTFSSYAMHWVRQAPGKGLEWVAVISYDGSNKYYADSVKGRFTISRDNSKNTLYLQMNSLRAEDTAVYYCARGRVYYYDSSGYSYWGQGTLVTVSSGGGSEGGGSEGGGSEGGGQSVLTQPPSVSGAPGQRVTISCTGSSSNIGAGYDVHWYQQLPGTAPKLLIYGNSNRPSGVPDRFSGSKSGTSASLAITGLQAEDEADYYCQSYDSSLSGREVFGTGTKLTVL

SEQ ID NO: 77 - protein, 250 aa, Artificial Sequence
  Description of Artificial Sequence: Synthetic polypeptide
QVQLVESGAEVKKPGSSVKVSCKASGGTFSSYAISWVRQAPGQGLEWMGGIIPIFGTANYAQKFQGRVTITADESTSTAYMELSSLRSEDTAVYYCARPLYAPRFGYGMDVWGQGTLVTVSSGGGSEGGGSEGGGSEGGGQSVLTQPPSASGTPGQRVTISCSGSSSNIGSNYVYWYQQLPGTAPKLLIYRNNQRPSGVPDRFSGSKSGTSASLAISGLRSEDEADYYCAAWDDSLSGWVFGGGTQLTVL

SEQ ID NO: 78 - protein, 247 aa, Artificial Sequence
  Description of Artificial Sequence: Synthetic polypeptide
EVQLLESGGGLVQPGGSLRLSCAASGFTFSSYAMSWVRQAPGKGLEWVSAISGSGGSTYYADSVKGRFTISRDNSKNTLYLQMNSLRAEDTAVYYCAKDRGGQRGFDYWGQGTLVTVSSGGGSEGGGSEGGGSEGGGQSVLTQPPSASGTPGQRVTISCSGSSSNIGSNYVYWYQQLPGTAPKLLIYRNNQRPSGVPDRFSGSKSGTSASLAISGLRSEDEADYYCAAWDDSLSGLVFGGGTKLTVL

SEQ ID NO: 79 - protein, 251 aa, Artificial Sequence
  Description of Artificial Sequence: Synthetic polypeptide
QVQLVQSGAEVKKPGSSVKVSCKASGGTFSSYAISWVRQAPGQGLEWMGGIIPIFGTANYAQKFQGRVTITADESTSTAYMELSSLRSEDTAVYYCARDILRLSVSSGMDVWGQGTLVTVSSGSTSGSGKPGSGEGSTKGQSVLTQPPSASGTPGQRVTISCSGGSSNIGSNYVYWYQQLPGTAPKLLIYRNNQRPSGVPDRFSGSKSGTSASLAISGLRSEDEADYYCAAWDDSLSGHVVFGGGTKLTVL

SEQ ID NO: 80 - protein, 250 aa, Artificial Sequence
  Description of Artificial Sequence: Synthetic polypeptide
QVQLVQSGAEVKKPGSSVKVSCKASGGTFSSYAISWVRQAPGQGLEWMGGIIPIFGTANYAQKFQGRVTITADESTSTAYMELSSLRSEDTAVYYCARDILRLSVSSGMDVWGQGTLVTVSSGSTSGSGKPGSGEGSTKGQSVLTQPPSASGTPGQRVTISCSGSSSNIGSNYVYWYQQLPGTAPKLLIYRNNQRPSGVPDRLSGSKSGTSASLAISGLRSEDEADYYCAAWDDSLSAVVFGGGTKLTVL

SEQ ID NO: 81 - protein, 251 aa, Artificial Sequence
  Description of Artificial Sequence: Synthetic polypeptide
QVQLQESGGGVVQPGRSLRLSCAASGFTLSSYGMHWVRQAPGKGLEWVAVISYDGSNKYYADSVKGRFTISRDNSKNTLYLQMNSLRAEDTAVYYCAKSGWRYYYYYGMDVWGQGTLVTVSSGSTSGSGKPGSGEGSTKGQSVLTQPPSVSGAPGQRVTISCTGSSSNIGAGYDVHWYQQLPGTAPKLLIYGNSNRPSGVPDRFSGSKSGTSASLAITGLQAEDEADYYCQSYDSSLSGSVFGGGTKLTVL

SEQ ID NO: 82 - protein, 252 aa, Artificial Sequence
  Description of Artificial Sequence: Synthetic polypeptide
QVQLVQSGAEVKKPGSSVKVSCKASGGTFSSYAISWVRQAPGQGLEWMGGIIPIFGTANYAQKFQGRVTITADESTSTAYMELSSLRSEDTAVYYCARDILRLSVSSGMDVWGQGTMVTVSSGSTSGSGKPGSGEGSTKGQSVLTQPPSASGTPGQRVTISCSGSSSNIGSNYVYWYQQLPGTAPKLLIYRNNQRPSGVPDRFSGSKSGTSASLAISGLRSEDEADYYCAAWDDSLSGPSVVFGGGTKLTVL

SEQ ID NO: 83 - protein, 251 aa, Artificial Sequence
  Description of Artificial Sequence: Synthetic polypeptide
QVQLVQSGAEVKKPGASVKVSCKASGYTFTSYGISWVRQAPGQGLEWMGWIGAYNGNTNYAQKLQGRVTMTTDTSTSTAYMELRSLRSDDTAVYYCARDLRRYSSSWDGPGYWGQGTLVTVSSGSTSGSGKPGSGEGSTKGQSALTQPASVSGSPGQSITISCTGTSSDVGGYNYVSWYQQHPGKAPKLMIYDVSNRPSGVSNRFSGSKSGNTASLTISGLQAEDEADYYCSSYTSSSTRVFGTGTKLTVL

SEQ ID NO: 84 - protein, 250 aa, Artificial Sequence
  Description of Artificial Sequence: Synthetic polypeptide
QVQLVQSGAEVKKPGSSVKVSCKASGGTFSSYAISWVRQAPGQGLEWMGGIIPIFGTANYAQKFQGRVTITADESTSTAYMELSSLRSEDTAVYYCARDILRLSVSSGMDVWGQGTLVTVSSGSTSGSGKPGSGEGSTKGSYVLTQPPSASGTPGQRVTISCSGSSSNIGGNYVYWYQQLPGTAPKLLIYRNNQRPSGVPDRFSGSKSGTSASLAISGLRSEDEADYYCAAWDDSLSGWVFGGGTKLTVL

SEQ ID NO: 85 - protein, 252 aa, Artificial Sequence
  Description of Artificial Sequence: Synthetic polypeptide
QVQLVQSGAEVKKPGSSVKVSCKASGGTFSSYAISWVRQAPGQGLEWMGGIIPIFGTANYAQKFQGRVTITADKSTSTAYMELSSLRSEDTAVYYCARDGGRYSYGRSFDYWGQGTLVTVSSGSTSGSGKPGSGEGSTKGQSVLTQPPSVSGAPGQRVTISCTGSSSNIGAGYDVHWYQQLPGTAPKLLIYGNSNRPSGVPDRFSGSKSGTSASLAITGLQAEDEADYYCQSYDSSLSGPVVFGGGTKLTVL

SEQ ID NO: 86 - protein, 249 aa, Artificial Sequence
  Description of Artificial Sequence: Synthetic polypeptide
QVQLVQSGAEVKKPGSSVKVSCKASGGTFSSYAISWVRQAPGQGLEWMGGIIPIFGTANYAQKFQGRVTITADESTSTAYMELSSLRSEDTAVYYCARPLRPLHYYGMDVWGQGTLVTVSSGSTSGSGKPGSGEGSTKGQSVLTQPPSASGTPGQRVTISCSGSSSNIGSNYVYWYQQLPGTAPKLLIYRNNQRPSGVPDRFSGSKSGTSASLAISGLRSEDEADYYCAAWDDSLTEGVFGGGTKLTVL

SEQ ID NO: 87 - protein, 250 aa, Artificial Sequence
  Description of Artificial Sequence: Synthetic polypeptide
QVQLVESGGGVVQPGRSLRLSCAASGFTFSSYGMHWVRRAPGKGLEWVAVISYDGSNKYYADSVKGRFTISRDNSKNTLYLQMNSLRAEDTAVYYCAKDGGDSGSLDYWGQGTLVTVSSGSTSGSGKPGSGEGSTKGDIVMTQSPDSLAVSLGERATINCKSSQSVLYSSNNKNYLAWYQQKPGQPPKLLIYWASTRESGVPDRFSGSGSGTDFTLTISSLQAEDVAVYYCQQYYSTPLTFGGGTKLEIK

SEQ ID NO: 88 - protein, 245 aa, Artificial Sequence
  Description of Artificial Sequence: Synthetic polypeptide
EVQLLESGGGLVQPGGSLRLSCAASGFTFSSYWMSWVRQAPGKGLEWVANIKQDGSEKYYVDSVKGRFTISRDNAKNSLYLQMNSLRAEDTAVYYCARPAGQLLYGMDVWGQGTLVTVSSGSTSGSGKPGSGEGSTKGSYVLTQPPSVSVSPGQTARITCSGDALPKQYAYWYQQKPGQAPVLVIYKDSERPSGIPERFSGSSSGTTVTLTISGVQAEDEADYYCQSADSSGTWVFGGGTKLTVL

SEQ ID NO: 89 - protein, 250 aa, Artificial Sequence
  Description of Artificial Sequence: Synthetic polypeptide
EVQLLESGGGVVQPGRSLRLSCAASGFTFSSYGMHWVRQAPGKGLEWVAVISYDGSNKYYADSVKGRFTISRDNSKNTLYLQMNSLRAEDTAVYYCAKDAADMGAFDYWGQGTLVTVSSGSTSGSGKPGSGEGSTKGDIQMTQSPDSLAVSLGERATMNCKSSQSVLYSSNNKNYLAWYQQKPGQPPKLLIYWASARESGVPDRFSGSGSGTDFTLTISSLQAEDVAVYYCQQYYSTPLTFGQGTKVEIK

SEQ ID NO: 90 - protein, 250 aa, Artificial Sequence
  Description of Artificial Sequence: Synthetic polypeptide
EVQLLESGGGLVKPGGSLRLSCAASGFTFSSYSMNWVRQAPGKGLEWVSAISGSGGSTYYADSVKGRFTISRDNSKNTLYLQMNSLRAEDTAVYYCARARGYSYGSDAFDIWGQGTMVTVSSGSTSGSGKPGSGEGSTKGQSVLTQPPSASGTPGQRVTISCSGSSSNIGSNYVYWYQQLPGTAPKLLIYRNNQRPSGVPDRFSGSKSGTSASLAISGLRSEDEADYYCAAWDDSLSGVVFGGGTKLTVL

SEQ ID NO: 91 - protein, 251 aa, Artificial Sequence
  Description of Artificial Sequence: Synthetic polypeptide
QVQLVQSGGGVVQPGRSLRLSCAASGFTFSSYGMHWVRQAPGKGLEWVAVISYDGSNKYYADSVKGRFTISRDNSKNTLYLQMNSLRAEDTAVYYCAKGVPRYYYYYGMDVWGQGTMVTVSSGSTSGSGKPGSGEGSTKGQSVLTQPPSVSGAPGQRVTISCTGSSSNIGAGYDVHWYQQLPGTAPKLLIYGNSNRPSGVPDRFSGSKSGTSASLAITGLQAEDEADYYCQSYDSSLSGSVFGGGTKLTVL

SEQ ID NO: 92 - protein, 254 aa, Artificial Sequence
  Description of Artificial Sequence: Synthetic polypeptide
EVQLVQSGAEVKKPGSSVKVSCKASGGTFSSYAISWVRQAPGQGLEWMGGIIPIFGTANYAQKFQGRVTITADESTSTAYMELSSLRSEDTAVYYCARDRGRRYCSGGSCPNAFDIWGQGTMVTVSSGSTSGSGKPGSGEGSTKGEIVLTQSPATLSVSPGERATLSCRASQSVSSNLAWYQQKPGQAPRLLIYGASTRATGIPARFSGSGSGTEFTLTISSLQSEDFAVYYCQQYNNWPPALTFGGGTKVEIK

SEQ ID NO: 93 - protein, 254 aa, Artificial Sequence
  Description of Artificial Sequence: Synthetic polypeptide
QVQLVQSGAEVKKPGSSVKVSCKASGGTFSSYAISWVRQAPGQGLEWMGGIIPIFGTANYAQKFQGRVTITADESTSTAYMELSSLRSEDTAVYYCARGGYVWGSYRQNSNWFDPWGQGTLVTVSSGSTSGSGKPGSGEGSTKGSYVLTQPPSASGTPGQRVTISCSGSSSNIGSNYVYWYQQLPGTAPKLLIYRNNQRPSGVPDRFSGSKSGTSASLAISGLRSEDEADYYCAAWDDSLSGWVFGGGTKLTVL

SEQ ID NO: 94 - protein, 250 aa, Artificial Sequence
  Description of Artificial Sequence: Synthetic polypeptide
QVQLVESGAEVKKPGSSVKVSCKASGGTFSSYAISWVRQAPGQGLEWMGGIIPIFGTANYAQKFQGRVTITADESTSTAYMELSSLRSEDTAVYYCARDILRLSVSSGMDVWGQGTLVTVSSGSTSGSGKPGSGEGSTKGQSVLTQPPSASGTPGRRVTISCSGSSSNIGSNYVYWYQQLPGTAPKLLIYRNNQRPSGVPDRFSGSKSGTSASLAISGLRSEDEADYYCAAWDDSLSGVVFGGGTKLTVL

SEQ ID NO: 95 - protein, 246 aa, Artificial Sequence
  Description of Artificial Sequence: Synthetic polypeptide
QVQLVESGGGLVQPGGSLRLSCAASGFTFSSYWMSWVRQAPGKGLEWVANIKQDGSEKYYVDSVKGRFTISRDNAKNSLYLQMNSLRAEDTAVYYCARWSHYYDSSGLDYWGQGTLVTVSSGSTSGSGKPGSGEGSTKGSYVLTQPPSVSVSPGQTARITCSGDALPKQYAYWYQQKPGQAPVLVIYKDSERPSGIPERFSGSSSGTTVTLTISGVQAEDEADYYCQSADSSGTWVFGGGTKLTVL

SEQ ID NO: 96 - protein, 253 aa, Artificial Sequence
  Description of Artificial Sequence: Synthetic polypeptide
QVQLVESGAEVKKPGSSVKVSCKASGGTFSSYAISWVRQAPGQGLEWMGGIIPIFGTANYAQKFQGRVTITADKSTSTAYMELSSLRSEDTAVYYCARTHLPYSYGLGGFDYWGQGTLVTVSSGSTSGSGKPGSGEGSTKGQSVLTQPPSVSGAPGQRVTISCTGSSSNIGAGYDVHWYQQLPGTAPKLLIYGNSNRPSGVPDRFSGSKSGTSASLAITGLQAEDEADYYCQSYDSSLSGPVVFGGGTKVTVL

SEQ ID NO: 97 - protein, 255 aa, Artificial Sequence
  Description of Artificial Sequence: Synthetic polypeptide
EVQLVQSGAEVKKPGSSVKVSCKASGGTFSSYAISWVRQAPGQGLEWMGGIIPIFGTANYAQKFQGRVTITADESTSTAYMELSSLRSEDTAVYYCARDPSRDYYGSGRFSWFDPWGQGTLVTVSSGSTSGSGKPGSGEGSTKGQSVLTQPPSASGTPGQRVTISCSGSSSNIGSNYVYWYQQLPGTAPKLLIYRNNQRPSGVPDRFSGSKSGTSASLAISGLRSEDEADYYCAAWDDSLSGRGVFGGGTKLTVL

SEQ ID NO: 98 - protein, 255 aa, Artificial Sequence
  Description of Artificial Sequence: Synthetic polypeptide
QVQLVQSGAEVKKPGASVKVSCKASGYTFTSYGISWVRQAPGQGLEWMGWISAYNGNTNYAQKLQGRVTMTTDTSTSTAYMELRSLRSDDTAVYYCARDIIRYCSSTSCYRGIDYWGQGTLVTVSSGSTSGSGKPGSGEGSTKGQSALTQPASVSGSPGQSITISCTGTSSDVGGYNYVSWYQQHPGKAPKLMIYDVSNRPSGVSNRFSGSKSGNTASLTISGLQAEDEADYYCSSYTSSSPHVVSGGGTKLTVL

SEQ ID NO: 99 - protein, 251 aa, Artificial Sequence
  Description of Artificial Sequence: Synthetic polypeptide
QVQLVESGGGVVQPGRSLRLSCAASGFTFSSYGMHWVRQAPGKGLEWVAVISYDGSNKYYADSVKGRFTISRDNSKNTLYLQMNSLRAEDTAVYYCARDGTDYRGAFDIWGQGTMVTVSSGSTSGSGKPGSGEGSTKGDIQLTQSPDSLAVPLGERATINCKSSQSVLYSSNNKNYLAWYQQKPGQPPKLLIYWASTRESGVPDRFSGSGSGTDFTLTISSLQAEDVAVYYCQQYYSTPLTFGQGTKLEIK

SEQ ID NO: 100 - protein, 251 aa, Artificial Sequence
  Description of Artificial Sequence: Synthetic polypeptide
EVQLVQSGAEVKKPGSSVRVSCKASGGTFSSYAISWVRQAPGQGLEWMGGIIPIFGTANYAQKFQGRVTITADKSTSTAYMELSSLRSEDTAVYYCARGGGRWLHSRLDVWGQGTTVTVSSGSTSGSGKPGSGEGSTKGQSVLTQPPSVSGAPGQRVTISCTGSSSNIGAGYDVHWYQQFPGTAPKLLIFGNNNRPSGVPDRFSGSKSGTSASLAITGLQAEDEANYYCQSYDRSLSGPVVFGGGTKLTVL

SEQ ID NO: 101 - protein, 250 aa, Artificial Sequence
  Description of Artificial Sequence: Synthetic polypeptide
EVQLVESGGGVVQPGRSLRLSCAASGFTFSSYGMHWVRQAPGKGLEWVAVISYDGSNKYYADSVKGRFTISRDNSKNTLYLQMNSLRAEDTAVYYCAKDAGDLGAFDIWGQGTMVTVSSGSTSGSGKPGSGEGSTKGDIVMTQSPDSLAVSLGERATINCKSSQSVLYSSNNKNYLAWYQQKPGQPPKLLIYWASTRESGVPDRFSGSGSGTDFTLTISSLQAEDVAVYYCQQYYSTPLTFGPGTKVEIK

SEQ ID NO: 102 - protein, 252 aa, Artificial Sequence
  Description of Artificial Sequence: Synthetic polypeptide
QVQLVQSGGGVVQPGRSLRLSCAASGFTFSSYAMHWVRQAPGKGLEWVAVISYDGSNKYYADSVKGRFTISRDNSKNTLYLQMNSLRAEDTAVYYCARGRVYYYDSSGYSYWGQGTLVTVSSGSTSGSGKPGSGEGSTKGQSVLTQPPSVSGAPGQRVTISCTGSSSNIGAGYDVHWYQQLPGTAPKLLIYGNSNRPSGVPDRFSGSKSGTSASLAITGLQAEDEADYYCQSYDSSLSGREVFGTGTKLTVL

SEQ ID NO: 103 - protein, 250 aa, Artificial Sequence
  Description of Artificial Sequence: Synthetic polypeptide
QVQLVESGAEVKKPGSSVKVSCKASGGTFSSYAISWVRQAPGQGLEWMGGIIPIFGTANYAQKFQGRVTITADESTSTAYMELSSLRSEDTAVYYCARPLYAPRFGYGMDVWGQGTLVTVSSGSTSGSGKPGSGEGSTKGQSVLTQPPSASGTPGQRVTISCSGSSSNIGSNYVYWYQQLPGTAPKLLIYRNNQRPSGVPDRFSGSKSGTSASLAISGLRSEDEADYYCAAWDDSLSGWVFGGGTQLTVL

SEQ ID NO: 104 - protein, 247 aa, Artificial Sequence
  Description of Artificial Sequence: Synthetic polypeptide
EVQLLESGGGLVQPGGSLRLSCAASGFTFSSYAMSWVRQAPGKGLEWVSAISGSGGSTYYADSVKGRFTISRDNSKNTLYLQMNSLRAEDTAVYYCAKDRGGQRGFDYWGQGTLVTVSSGSTSGSGKPGSGEGSTKGQSVLTQPPSASGTPGQRVTISCSGSSSNIGSNYVYWYQQLPGTAPKLLIYRNNQRPSGVPDRFSGSKSGTSASLAISGLRSEDEADYYCAAWDDSLSGLVFGGGTKLTVL

SEQ ID NO: 105 - protein, 239 aa, Artificial Sequence
  Description of Artificial Sequence: Synthetic polypeptide
EVKLVESGGGLVQPGGSLKLSCTTSGFTFSSYGLSWIRQTPDKRLELVASINRNGDNTYYTDSVKGRFTISRHDAKNTLNLQMNSLKSEDTAMYYCTRGGFSYWGQGTLVTVSAGSTSGSGKPGSGEGSTKGDIVLTQSPAIMSSSPGEKVTMTCSASSSVSYMYWYQQRPGSSPRLLIYDTSKLASGVPVRFSGSVSGTSYSLTISRMESEDAATYYCQQWSGFPPITFGAGTKLELK

SEQ ID NO: 106 - protein, 239 aa, Artificial Sequence
  Description of Artificial Sequence: Synthetic polypeptide
EVKLVESGGGLVQPGGSLKLSCTTSGFTFSSYGLSWIRQTPDKRLELVASINRNGDNTYYTDSVRGRFTISRDNAKNTLNLQMSSLKSEDTAMYYCTRGGFSYWGQGTLVTVSAGSTSGSGKPGSGEGSTKGDIVLTQSPATMSASPGEKVTLTCSASPGVTYMYWYQQKPGSSPRLLIYDTSNLASGVPLRFSGSGSGTSYSLTISRTEAEDAATYYCQQWSGYPPITFGAGTKLELR

SEQ ID NO: 107 - protein, 239 aa, Artificial Sequence
  Description of Artificial Sequence: Synthetic polypeptide
EVKLVESGGGLVQPGGSLKLSCTTSGFTFSSYGLSWIRQTPDKRLELVASINRNGDNAYYIDSVKGRFTISRDNAKNALNLQMSSLKSEDTAMYYCTRGGFSHWGQGTLVTVAAGSTSGSGKPGSGEGSTKGQIVLTQSPAIMSASPGEKVTMTCSASSSVSYMYWYQQKPGSSPRLLIYDTSNLASGVPVRFSGSGSGTSYSLIISRMEAEDAATYYCQQWSGYPPITFGAGTKLELK

SEQ ID NO: 108 - protein, 239 aa, Artificial Sequence
  Description of Artificial Sequence: Synthetic polypeptide
EVKLVESGGGLVQPGGSLKLSCAASGFTFSSYGLSWVRQTPDKGLELVASINRNGGNTYYTDSVKGRFTISRDNAKNTLNLQMSSLKSEDTAMYYCARGGFTYWGQGTLVTVSAGSTSGSGKPGSGEGSTKGQIVLTQSPAIMSAFPGEKVTMTCSASSSVGYMYWYQQKPGSSPRLLIYDTSNLASGVPVRFSGSGSGTAYSLTISRMEAEDAATYYCQQWSGYPPITFGAGTKLELK

SEQ ID NO: 109 - protein, 239 aa, Artificial Sequence
  Description of Artificial Sequence: Synthetic polypeptide
QVQLKESGGGLVRPGGSLKLSCAASGFTFSNYGMSWIRQTPDKNLELVASINTSGGNTYYPDSVKGRFTISRDNARATLNLQMSNLKSEDTAIYYCTRGGFTHWGQGTLVAVSAGSTSGSGKPGSGEGSTKGQIVLTQSPAIMSASPGEKVTMTCSASSSVSYMYWYQQKPGSSPRLLIYDTSNLASGVPVRFSGSGSGTSYFLTISRMEAEDAATYYCQQWTGYPPITFGAGTKLELR

SEQ ID NO: 110 - protein, 239 aa, Artificial Sequence
  Description of Artificial Sequence: Synthetic polypeptide
QVQLKESGGGLVQPGGSLKLSCAASGFPFSSYGLSWVRQTPDKRLELVATINRNGDSAYYPDSVKGRFTISRDDAKNTLYLQMSSLKSEDTAMYYCTRGGFAYWGQGTLVTVSAGSTSGSGKPGSGEGSTKGQIVLTQSPAIMSASPGEKVTMTCSGSSSVGYMYWYQQKPGFSPRLLIYDTSNLASGVPVRFSGSGSGTSYSLTISRMEAEDAATYYCQQWSGYPPITFGAGTKLELK

SEQ ID NO: 111 - protein, 239 aa, Artificial Sequence
  Description of Artificial Sequence: Synthetic polypeptide
EVKLVESGGGLVRPGGSLKLSCAASGFTFSNYGMSWIRQTPDKNLELVASINTSGGNTYYPDSVKGRFTISRDNARATLNLQMSNLKSEDTAIYYCTRGGFTHWGQGTLVTVSAGSTSGSGKPGSGEGSTKGDIVLTQSPAIMSASPGEKVTMTCSASSSVAFMYWYQQKPGSSPRLLIYDTSKLASGVPVRFSGSGSGTSYSLTISRMEAEDAATYYCQQWSGYPPITFGAGTKLELK

SEQ ID NO: 112 - protein, 239 aa, Artificial Sequence
  Description of Artificial Sequence: Synthetic polypeptide
QVQLKESGGGLVQPGGSLKLSCTTSGFTFSSYGLSWIRQTPDKRLELVASINRNGDNTYYTDSVRGRFTISRDNAKSTLNLQMSSLKSEDTAMYYCTRGGFSYWGQGTLVTVSAGSTSGSGKPGSGEGSTKGQIVLTQSPPLMSASPGEKVTMTCSASSSVGYMYWFQQRPGSSPRLLIYDTYNLASGVPVRFSGSGSGTSYSLTISRLEAEDAATYYCQQWSGYPPITFGAGTKLELR

SEQ ID NO: 113 - protein, 239 aa, Artificial Sequence
  Description of Artificial Sequence: Synthetic polypeptide
EVKLVESGGGLVQPGGSLKLSCAASGFTFSSYGLSWVRQTPDKRLELVASVNRNGGNTYYTDSVKGRFTISRDNAKNTLNLQMSSLKSEDTAMYYCARGGFTYWGQGTLVTVSAGSTSGSGKPGSGEGSTKGQIVLTQSPAIMSASPGEKVTMTCSASSSVGYMYWYQQKPGSSPRLLIYDTSHLASGVPVRFSGSGSGTSYSLTISRMEAEDAATYYCQQWSGYPPITFGAGTKLELK

SEQ ID NO: 114 - protein, 239 aa, Artificial Sequence
  Description of Artificial Sequence: Synthetic polypeptide
EVKLVESGGGLVQPGGSLKLSCAASGFPFSSYGLSWVRQTPDKRLELVATINRNGDSAYYPDSVKGRFTISRDDAKNTLYLQMSSLKSEDTAMYYCTRGGFAYWGQGTLVTVSAGSTSGSGKPGSGEGSTKGQIVLTQSPVIMSASPGEKVTMTCSASSSVGYMYWYQQRPGSSPRLLIYDTSNLASGAPVRFSGSGSGTSYSLTISRMEAEDAATYYCQQWSGYPPITFGAGTKLELK

SEQ ID NO: 115 - protein, 239 aa, Artificial Sequence
  Description of Artificial Sequence: Synthetic polypeptide
EVKLVESGGGLVQPGGSLKLSCTTSGFTFSSYGLSWIRQTPDKRLELVASINRNGDNTYYTDSVKGRFTISRDNAKNTLNLQMSSLKSEDTAMYYCTRGGFSYWGQGTLVTVSAGSTSGSGKPGSGEGSTKGQIVLTQSPAIMSASPGEKVTMTCSASSSVSYMYWYQQKPGSSPRLLIYDTSNLASGVPVRFSGSGSGTSYSLTISRMEAEDAATYYCQQWTGYPPITFGAGTKLELK

SEQ ID NO: 116 - protein, 239 aa, Artificial Sequence
  Description of Artificial Sequence: Synthetic polypeptide
EVKLVESGGVLVQPGGSLKLSCAASGFTFSSYGMSWVRQTPDKRLELVASINKNGGSTYYPDSVKGRFTISRDNAKTTVYLQMSSLKSEDTAMYYCTRGGFAYWGQGTLVTVSAGSTSGSGKPGSGEGSTKGQIVLTQSPAIMSASPGEKVTLTCSASSSVGYMYWYQQRPGSSPRLLIYDTSNLPSGVPVRFSGSGSGTSYSLTISRMEAEDAATYYCQQWSGYPPITFGAGTKLELK

SEQ ID NO: 117 - protein, 119 aa, Artificial Sequence
  Description of Artificial Sequence: Synthetic polypeptide
QLQLQESGGGLVQAGGSLRLSCAASGRTGSSYAMGWFRQAPGKEREFVAAITWSGGITAYADSVKGRFTISRDNAKNTVYLQMNSLKPEDTAVYCCAAGVTGSPSFDSWGQGTQVTVSS

SEQ ID NO: 118 - protein, 119 aa, Artificial Sequence
  Description of Artificial Sequence: Synthetic polypeptide
QVQLQESGGGLVQAGGSLRLSCAASGRTFSSYAMGWFRQAPGKEREFVAAISGSGGSIYYGDSVKGRFTISRDNAKNTMYLQMNRLKPEDTAVYYCAAGPLGSPDFDSWGQGTQVTVSS

SEQ ID NO: 119 - protein, 119 aa, Artificial Sequence
  Description of Artificial Sequence: Synthetic polypeptide
EVQVVESGGGLVQPGGSLRLSCVASGRTFSSYAMGWFRQAPGKEREFVAAISGSGGSIYYGDSVKGRFTISRDNAKNTMYLQMNRLKPEDTAVYYCAAGPLGSPDFDSWGQGTQVTVSS

SEQ ID NO: 120 - protein, 119 aa, Artificial Sequence
  Description of Artificial Sequence: Synthetic polypeptide
KVQLVESGGGLVQAGGSLRLSCAASGRTGSSYAMGWFRQAPGKEREFVAAITWSGGITAYADSVKGRFTISRDNAKNTVYLQMNSLKPEDTAVYCCAAGVTGSPSFDSWGQGTQVTVSS

SEQ ID NO: 121 - protein, 119 aa, Artificial Sequence
  Description of Artificial Sequence: Synthetic polypeptide
EVQLVESGGGLVQAGGSLRLSCAASGRTFSSYAMGWFRQAPGKEREFVAAISGSGGVTFYAHSVKGRFTISRDNAKNTVYLQMNSLKPEDTAVYSCAGGAHGSPDFGSWGQGTQVTVSS

SEQ ID NO: 122 - protein, 115 aa, Artificial Sequence
  Description of Artificial Sequence: Synthetic polypeptide
QVQLVESGGGLVQPGGSLRLSCAVSRNIASLYRVDWYRQAPGKQRELVAGRTSGGTTTYLDAVEGRFTISRDNVKDTVYLQMNSLTPEDTAVYYCHAHDHWRDSWGQGTQVTVSS

SEQ ID NO: 123 - protein, 115 aa, Artificial Sequence
  Description of Artificial Sequence: Synthetic polypeptide
QVQLVESGGDLVQPGGSLRLSCAASGSIGSIYAMGWYRQAPGRQRELVATTTSGGTTNYADSVKGRFTIAGDNAKNTVFLQMNSLRPEDTAVYYCKIQTHWYVYWGQGTQVTVSS

SEQ ID NO: 124 - protein, 115 aa, Artificial Sequence
  Description of Artificial Sequence: Synthetic polypeptide
EVQLVESGGGLVQPGGSLRLSCAASRNIFSLYRVDWYRQAPGKQRELVAGSTSGGTTTYADAVKGRFTISTDNVKDTVYLQMNSLTPEDTAVYYCHAHDHWRDSWGQGTQVTVSS

SEQ ID NO: 125 - protein, 115 aa, Artificial Sequence
  Description of Artificial Sequence: Synthetic polypeptide
QVQLVESGGGWVHPGGSLRLSCAASRNIFSMYRVDWYRQAPGKQRELVAGITSGGTTSYADAVKGRFTISTDNVKDTVYLQMNSVTPEDTAVYYCHAHDHWRDSWGQGTQVTVSS

SEQ ID NO: 126 - protein, 115 aa, Artificial Sequence
  Description of Artificial Sequence: Synthetic polypeptide
EVQVQESGGDLVQPGGSLRLSCAASGSIGSIYRKGWYRQAPGSQRELVATITSAGTTNYADSVKGRFTISRDNAKNTVYLQMNSLRPEDTAVYYCNFQTHWYVYWGQGTQVTVSS

SEQ ID NO: 127 - protein, 115 aa, Artificial Sequence
  Description of Artificial Sequence: Synthetic polypeptide
EVRLVESGGGLVQPGGSLRLSCAVSKNIFSIYRVDWYHQAPGKQRELVAGWTSGGSTSYADAVKGRFTISTDNVKDTVYLQMNSLTPEDTAVYYCHAHDHWRDYWGQGTQVTVSS

SEQ ID NO: 128 - protein, 114 aa, Artificial Sequence
  Description of Artificial Sequence: Synthetic polypeptide
EVKLVESGGGLVQPGGSLKLSCTTSGFTFSSYGLSWIRQTPDKRLELVASINRNGDNTYYTDSVKGRFTISRHDAKNTLNLQMNSLKSEDTAMYYCTRGGFSYWGQGTLVTVSA

SEQ ID NO: 129 - protein, 107 aa, Artificial Sequence
  Description of Artificial Sequence: Synthetic polypeptide
DIVLTQSPAIMSSSPGEKVTMTCSASSSVSYMYWYQQRPGSSPRLLIYDTSKLASGVPVRFSGSVSGTSYSLTISRMESEDAATYYCQQWSGFPPITFGAGTKLELK

SEQ ID NO: 130 - protein, 114 aa, Artificial Sequence
  Description of Artificial Sequence: Synthetic polypeptide
EVKLVESGGGLVQPGGSLKLSCTTSGFTFSSYGLSWIRQTPDKRLELVASINRNGDNTYYTDSVRGRFTISRDNAKNTLNLQMSSLKSEDTAMYYCTRGGFSYWGQGTLVTVSA

SEQ ID NO: 131 - protein, 107 aa, Artificial Sequence
  Description of Artificial Sequence: Synthetic polypeptide
DIVLTQSPATMSASPGEKVTLTCSASPGVTYMYWYQQKPGSSPRLLIYDTSNLASGVPLRFSGSGSGTSYSLTISRTEAEDAATYYCQQWSGYPPITFGAGTKLELR

SEQ ID NO: 132 - protein, 114 aa, Artificial Sequence
  Description of Artificial Sequence: Synthetic polypeptide
EVKLVESGGGLVQPGGSLKLSCTTSGFTFSSYGLSWIRQTPDKRLELVASINRNGDNAYYIDSVKGRFTISRDNAKNALNLQMSSLKSEDTAMYYCTRGGFSHWGQGTLVTVAA

SEQ ID NO: 133 - protein, 107 aa, Artificial Sequence
  Description of Artificial Sequence: Synthetic polypeptide
QIVLTQSPAIMSASPGEKVTMTCSASSSVSYMYWYQQKPGSSPRLLIYDTSNLASGVPVRFSGSGSGTSYSLIISRMEAEDAATYYCQQWSGYPPITFGAGTKLELK

SEQ ID NO: 134 - protein, 114 aa, Artificial Sequence
  Description of Artificial Sequence: Synthetic polypeptide
EVKLVESGGGLVQPGGSLKLSCAASGFTFSSYGLSWVRQTPDKGLELVASINRNGGNTYYTDSVKGRFTISRDNAKNTLNLQMSSLKSEDTAMYYCARGGFTYWGQGTLVTVSA

SEQ ID NO: 135 - protein, 107 aa, Artificial Sequence
  Description of Artificial Sequence: Synthetic polypeptide
QIVLTQSPAIMSAFPGEKVTMTCSASSSVGYMYWYQQKPGSSPRLLIYDTSNLASGVPVRFSGSGSGTAYSLTISRMEAEDAATYYCQQWSGYPPITFGAGTKLELK

SEQ ID NO: 136 - protein, 114 aa, Artificial Sequence
  Description of Artificial Sequence: Synthetic polypeptide
QVQLKESGGGLVRPGGSLKLSCAASGFTFSNYGMSWIRQTPDKNLELVASINTSGGNTYYPDSVKGRFTISRDNARATLNLQMSNLKSEDTAIYYCTRGGFTHWGQGTLVAVSA

SEQ ID NO: 137 - protein, 107 aa, Artificial Sequence
  Description of Artificial Sequence: Synthetic polypeptide
QIVLTQSPAIMSASPGEKVTMTCSASSSVSYMYWYQQKPGSSPRLLIYDTSNLASGVPVRFSGSGSGTSYFLTISRMEAEDAATYYCQQWTGYPPITFGAGTKLELR

SEQ ID NO: 138 - protein, 114 aa, Artificial Sequence
  Description of Artificial Sequence: Synthetic polypeptide
QVQLKESGGGLVQPGGSLKLSCAASGFPFSSYGLSWVRQTPDKRLELVATINRNGDSAYYPDSVKGRFTISRDDAKNTLYLQMSSLKSEDTAMYYCTRGGFAYWGQGTLVTVSA

SEQ ID NO: 139 - protein, 107 aa, Artificial Sequence
  Description of Artificial Sequence: Synthetic polypeptide
QIVLTQSPAIMSASPGEKVTMTCSGSSSVGYMYWYQQKPGFSPRLLIYDTSNLASGVPVRFSGSGSGTSYSLTISRMEAEDAATYYCQQWSGYPPITFGAGTKLELK

SEQ ID NO: 140 - protein, 114 aa, Artificial Sequence
  Description of Artificial Sequence: Synthetic polypeptide
EVKLVESGGGLVRPGGSLKLSCAASGFTFSNYGMSWIRQTPDKNLELVASINTSGGNTYYPDSVKGRFTISRDNARATLNLQMSNLKSEDTAIYYCTRGGFTHWGQGTLVTVSA

SEQ ID NO: 141 - protein, 107 aa, Artificial Sequence
  Description of Artificial Sequence: Synthetic polypeptide
DIVLTQSPAIMSASPGEKVTMTCSASSSVAFMYWYQQKPGSSPRLLIYDTSKLASGVPVRFSGSGSGTSYSLTISRMEAEDAATYYCQQWSGYPPITFGAGTKLELK

SEQ ID NO: 142 - protein, 114 aa, Artificial Sequence
  Description of Artificial Sequence: Synthetic polypeptide
QVQLKESGGGLVQPGGSLKLSCTTSGFTFSSYGLSWIRQTPDKRLELVASINRNGDNTYYTDSVRGRFTISRDNAKSTLNLQMSSLKSEDTAMYYCTRGGFSYWGQGTLVTVSA

SEQ ID NO: 143 - protein, 107 aa, Artificial Sequence
  Description of Artificial Sequence: Synthetic polypeptide
QIVLTQSPPLMSASPGEKVTMTCSASSSVGYMYWFQQRPGSSPRLLIYDTYNLASGVPVRFSGSGSGTSYSLTISRLEAEDAATYYCQQWSGYPPITFGAGTKLELR

SEQ ID NO: 144 - protein, 114 aa, Artificial Sequence
  Description of Artificial Sequence: Synthetic polypeptide
EVKLVESGGGLVQPGGSLKLSCAASGFTFSSYGLSWVRQTPDKRLELVASVNRNGGNTYYTDSVKGRFTISRDNAKNTLNLQMSSLKSEDTAMYYCARGGFTYWGQGTLVTVSA

SEQ ID NO: 145 - protein, 107 aa, Artificial Sequence
  Description of Artificial Sequence: Synthetic polypeptide
QIVLTQSPAIMSASPGEKVTMTCSASSSVGYMYWYQQKPGSSPRLLIYDTSHLASGVPVRFSGSGSGTSYSLTISRMEAEDAATYYCQQWSGYPPITFGAGTKLELK

SEQ ID NO: 146 - protein, 114 aa, Artificial Sequence
  Description of Artificial Sequence: Synthetic polypeptide
EVKLVESGGGLVQPGGSLKLSCAASGFPFSSYGLSWVRQTPDKRLELVATINRNGDSAYYPDSVKGRFTISRDDAKNTLYLQMSSLKSEDTAMYYCTRGGFAYWGQGTLVTVSA

SEQ ID NO: 147 - protein, 107 aa, Artificial Sequence
  Description of Artificial Sequence: Synthetic polypeptide
QIVLTQSPVIMSASPGEKVTMTCSASSSVGYMYWYQQRPGSSPRLLIYDTSNLASGAPVRFSGSGSGTSYSLTISRMEAEDAATYYCQQWSGYPPITFGAGTKLELK

SEQ ID NO: 148 - protein, 114 aa, Artificial Sequence
  Description of Artificial Sequence: Synthetic polypeptide
EVKLVESGGGLVQPGGSLKLSCTTSGFTFSSYGLSWIRQTPDKRLELVASINRNGDNTYYTDSVKGRFTISRDNAKNTLNLQMSSLKSEDTAMYYCTRGGFSYWGQGTLVTVSA

SEQ ID NO: 149 - protein, 107 aa, Artificial Sequence
  Description of Artificial Sequence: Synthetic polypeptide
QIVLTQSPAIMSASPGEKVTMTCSASSSVSYMYWYQQKPGSSPRLLIYDTSNLASGVPVRFSGSGSGTSYSLTISRMEAEDAATYYCQQWTGYPPITFGAGTKLELK

SEQ ID NO: 150 - protein, 114 aa, Artificial Sequence
  Description of Artificial Sequence: Synthetic polypeptide
EVKLVESGGVLVQPGGSLKLSCAASGFTFSSYGMSWVRQTPDKRLELVASINKNGGSTYYPDSVKGRFTISRDNAKTTVYLQMSSLKSEDTAMYYCTRGGFAYWGQGTLVTVSA

SEQ ID NO: 151 - protein, 107 aa, Artificial Sequence
  Description of Artificial Sequence: Synthetic polypeptide
QIVLTQSPAIMSASPGEKVTLTCSASSSVGYMYWYQQRPGSSPRLLIYDTSNLPSGVPVRFSGSGSGTSYSLTISRMEAEDAATYYCQQWSGYPPITFGAGTKLELK

SEQ ID NO: 152 - protein, 122 aa, Artificial Sequence
  Description of Artificial Sequence: Synthetic polypeptide
QVQLVQSGAEVKKPGSSVKVSCKASGGTFSSYAISWVRQAPGQGLEWMGGIIPIFGTANYAQKFQGRVTITADESTSTAYMELSSLRSEDTAVYYCARDILRLSVSSGMDVWGQGTLVTVSS

SEQ ID NO: 153 - protein, 111 aa, Artificial Sequence
  Description of Artificial Sequence: Synthetic polypeptide
QSVLTQPPSASGTPGQRVTISCSGGSSNIGSNYVYWYQQLPGTAPKLLIYRNNQRPSGVPDRFSGSKSGTSASLAISGLRSEDEADYYCAAWDDSLSGHVVFGGGTKLTVL

SEQ ID NO: 154 - protein, 122 aa, Artificial Sequence; identical to SEQ ID NO: 152
  Description of Artificial Sequence: Synthetic polypeptide

SEQ ID NO: 155 - protein, 110 aa, Artificial Sequence
  Description of Artificial Sequence: Synthetic polypeptide
QSVLTQPPSASGTPGQRVTISCSGSSSNIGSNYVYWYQQLPGTAPKLLIYRNNQRPSGVPDRLSGSKSGTSASLAISGLRSEDEADYYCAAWDDSLSAVVFGGGTKLTVL

SEQ ID NO: 156 - protein, 122 aa, Artificial Sequence
  Description of Artificial Sequence: Synthetic polypeptide
QVQLQESGGGVVQPGRSLRLSCAASGFTLSSYGMHWVRQAPGKGLEWVAVISYDGSNKYYADSVKGRFTISRDNSKNTLYLQMNSLRAEDTAVYYCAKSGWRYYYYYGMDVWGQGTLVTVSS

SEQ ID NO: 157 - protein, 111 aa, Artificial Sequence
  Description of Artificial Sequence: Synthetic polypeptide
QSVLTQPPSVSGAPGQRVTISCTGSSSNIGAGYDVHWYQQLPGTAPKLLIYGNSNRPSGVPDRFSGSKSGTSASLAITGLQAEDEADYYCQSYDSSLSGSVFGGGTKLTVL

SEQ ID NO: 158 - protein, 122 aa, Artificial Sequence
  Description of Artificial Sequence: Synthetic polypeptide
QVQLVQSGAEVKKPGSSVKVSCKASGGTFSSYAISWVRQAPGQGLEWMGGIIPIFGTANYAQKFQGRVTITADESTSTAYMELSSLRSEDTAVYYCARDILRLSVSSGMDVWGQGTMVTVSS

SEQ ID NO: 159 - protein, 112 aa, Artificial Sequence
  Description of Artificial Sequence: Synthetic polypeptide
QSVLTQPPSASGTPGQRVTISCSGSSSNIGSNYVYWYQQLPGTAPKLLIYRNNQRPSGVPDRFSGSKSGTSASLAISGLRSEDEADYYCAAWDDSLSGPSVVFGGGTKLTVL

SEQ ID NO: 160 - protein, 123 aa, Artificial Sequence
  Description of Artificial Sequence: Synthetic polypeptide
QVQLVQSGAEVKKPGASVKVSCKASGYTFTSYGISWVRQAPGQGLEWMGWIGAYNGNTNYAQKLQGRVTMTTDTSTSTAYMELRSLRSDDTAVYYCARDLRRYSSSWDGPGYWGQGTLVTVSS

SEQ ID NO: 161 - protein, 110 aa, Artificial Sequence
  Description of Artificial Sequence: Synthetic polypeptide
QSALTQPASVSGSPGQSITISCTGTSSDVGGYNYVSWYQQHPGKAPKLMIYDVSNRPSGVSNRFSGSKSGNTASLTISGLQAEDEADYYCSSYTSSSTRVFGTGTKLTVL

SEQ ID NO: 162 - protein, 122 aa, Artificial Sequence; identical to SEQ ID NO: 152
  Description of Artificial Sequence: Synthetic polypeptide

SEQ ID NO: 163 - protein, 110 aa, Artificial Sequence
  Description of Artificial Sequence: Synthetic polypeptide
SYVLTQPPSASGTPGQRVTISCSGSSSNIGGNYVYWYQQLPGTAPKLLIYRNNQRPSGVPDRFSGSKSGTSASLAISGLRSEDEADYYCAAWDDSLSGWVFGGGTKLTVL

SEQ ID NO: 164 - protein, 122 aa, Artificial Sequence
  Description of Artificial Sequence: Synthetic polypeptide
QVQLVQSGAEVKKPGSSVKVSCKASGGTFSSYAISWVRQAPGQGLEWMGGIIPIFGTANYAQKFQGRVTITADKSTSTAYMELSSLRSEDTAVYYCARDGGRYSYGRSFDYWGQGTLVTVSS

SEQ ID NO: 165 - protein, 112 aa, Artificial Sequence
  Description of Artificial Sequence: Synthetic polypeptide
QSVLTQPPSVSGAPGQRVTISCTGSSSNIGAGYDVHWYQQLPGTAPKLLIYGNSNRPSGVPDRFSGSKSGTSASLAITGLQAEDEADYYCQSYDSSLSGPVVFGGGTKLTVL

SEQ ID NO: 166 - protein, 121 aa, Artificial Sequence
  Description of Artificial Sequence: Synthetic polypeptide
QVQLVQSGAEVKKPGSSVKVSCKASGGTFSSYAISWVRQAPGQGLEWMGGIIPIFGTANYAQKFQGRVTITADESTSTAYMELSSLRSEDTAVYYCARPLRPLHYYGMDVWGQGTLVTVSS

SEQ ID NO: 167 - protein, 110 aa, Artificial Sequence
  Description of Artificial Sequence: Synthetic polypeptide
QSVLTQPPSASGTPGQRVTISCSGSSSNIGSNYVYWYQQLPGTAPKLLIYRNNQRPSGVPDRFSGSKSGTSASLAISGLRSEDEADYYCAAWDDSLTEGVFGGGTKLTVL

SEQ ID NO: 168 - protein, 119 aa, Artificial Sequence
  Description of Artificial Sequence: Synthetic polypeptide
QVQLVESGGGVVQPGRSLRLSCAASGFTFSSYGMHWVRRAPGKGLEWVAVISYDGSNKYYADSVKGRFTISRDNSKNTLYLQMNSLRAEDTAVYYCAKDGGDSGSLDYWGQGTLVTVSS

SEQ ID NO: 169 - protein, 113 aa, Artificial Sequence
  Description of Artificial Sequence: Synthetic polypeptide
DIVMTQSPDSLAVSLGERATINCKSSQSVLYSSNNKNYLAWYQQKPGQPPKLLIYWASTRESGVPDRFSGSGSGTDFTLTISSLQAEDVAVYYCQQYYSTPLTFGGGTKLEIK

SEQ ID NO: 170 - protein, 120 aa, Artificial Sequence
  Description of Artificial Sequence: Synthetic polypeptide
EVQLLESGGGLVQPGGSLRLSCAASGFTFSSYWMSWVRQAPGKGLEWVANIKQDGSEKYYVDSVKGRFTISRDNAKNSLYLQMNSLRAEDTAVYYCARPAGQLLYGMDVWGQGTLVTVSS

SEQ ID NO: 171 - protein, 107 aa, Artificial Sequence
  Description of Artificial Sequence: Synthetic polypeptide
SYVLTQPPSVSVSPGQTARITCSGDALPKQYAYWYQQKPGQAPVLVIYKDSERPSGIPERFSGSSSGTTVTLTISGVQAEDEADYYCQSADSSGTWVFGGGTKLTVL

SEQ ID NO: 172 - protein, 119 aa, Artificial Sequence
  Description of Artificial Sequence: Synthetic polypeptide
EVQLLESGGGVVQPGRSLRLSCAASGFTFSSYGMHWVRQAPGKGLEWVAVISYDGSNKYYADSVKGRFTISRDNSKNTLYLQMNSLRAEDTAVYYCAKDAADMGAFDYWGQGTLVTVSS

SEQ ID NO: 173 - protein, 113 aa, Artificial Sequence
  Description of Artificial Sequence: Synthetic polypeptide
DIQMTQSPDSLAVSLGERATMNCKSSQSVLYSSNNKNYLAWYQQKPGQPPKLLIYWASARESGVPDRFSGSGSGTDFTLTISSLQAEDVAVYYCQQYYSTPLTFGQGTKVEIK

SEQ ID NO: 174 - protein, 122 aa, Artificial Sequence
  Description of Artificial Sequence: Synthetic polypeptide
EVQLLESGGGLVKPGGSLRLSCAASGFTFSSYSMNWVRQAPGKGLEWVSAISGSGGSTYYADSVKGRFTISRDNSKNTLYLQMNSLRAEDTAVYYCARARGYSYGSDAFDIWGQGTMVTVSS

SEQ ID NO: 175 - protein, 110 aa, Artificial Sequence
  Description of Artificial Sequence: Synthetic polypeptide
QSVLTQPPSASGTPGQRVTISCSGSSSNIGSNYVYWYQQLPGTAPKLLIYRNNQRPSGVPDRFSGSKSGTSASLAISGLRSEDEADYYCAAWDDSLSGVVFGGGTKLTVL

SEQ ID NO: 176 - protein, 122 aa, Artificial Sequence
  Description of Artificial Sequence: Synthetic polypeptide
QVQLVQSGGGVVQPGRSLRLSCAASGFTFSSYGMHWVRQAPGKGLEWVAVISYDGSNKYYADSVKGRFTISRDNSKNTLYLQMNSLRAEDTAVYYCAKGVPRYYYYYGMDVWGQGTMVTVSS

SEQ ID NO: 177 - protein, 111 aa, Artificial Sequence; identical to SEQ ID NO: 157
  Description of Artificial Sequence: Synthetic polypeptide

SEQ ID NO: 178 - protein, 127 aa, Artificial Sequence
  Description of Artificial Sequence: Synthetic polypeptide
EVQLVQSGAEVKKPGSSVKVSCKASGGTFSSYAISWVRQAPGQGLEWMGGIIPIFGTANYAQKFQGRVTITADESTSTAYMELSSLRSEDTAVYYCARDRGRRYCSGGSCPNAFDIWGQGTMVTVSS

SEQ ID NO: 179 - protein, 109 aa, Artificial Sequence
  Description of Artificial Sequence: Synthetic polypeptide
EIVLTQSPATLSVSPGERATLSCRASQSVSSNLAWYQQKPGQAPRLLIYGASTRATGIPARFSGSGSGTEFTLTISSLQSEDFAVYYCQQYNNWPPALTFGGGTKVEIK

SEQ ID NO: 180 - protein, 126 aa, Artificial Sequence
  Description of Artificial Sequence: Synthetic polypeptide
QVQLVQSGAEVKKPGSSVKVSCKASGGTFSSYAISWVRQAPGQGLEWMGGIIPIFGTANYAQKFQGRVTITADESTSTAYMELSSLRSEDTAVYYCARGGYVWGSYRQNSNWFDPWGQGTLVTVSS

SEQ ID NO: 181 - protein, 110 aa, Artificial Sequence
  Description of Artificial Sequence: Synthetic polypeptide
SYVLTQPPSASGTPGQRVTISCSGSSSNIGSNYVYWYQQLPGTAPKLLIYRNNQRPSGVPDRFSGSKSGTSASLAISGLRSEDEADYYCAAWDDSLSGWVFGGGTKLTVL

SEQ ID NO: 182 - protein, 122 aa, Artificial Sequence
  Description of Artificial Sequence: Synthetic polypeptide
QVQLVESGAEVKKPGSSVKVSCKASGGTFSSYAISWVRQAPGQGLEWMGGIIPIFGTANYAQKFQGRVTITADESTSTAYMELSSLRSEDTAVYYCARDILRLSVSSGMDVWGQGTLVTVSS

SEQ ID NO: 183 - protein, 110 aa, Artificial Sequence
  Description of Artificial Sequence: Synthetic polypeptide
QSVLTQPPSASGTPGRRVTISCSGSSSNIGSNYVYWYQQLPGTAPKLLIYRNNQRPSGVPDRFSGSKSGTSASLAISGLRSEDEADYYCAAWDDSLSGVVFGGGTKLTVL

SEQ ID NO: 184 - protein, 121 aa, Artificial Sequence
  Description of Artificial Sequence: Synthetic polypeptide
QVQLVESGGGLVQPGGSLRLSCAASGFTFSSYWMSWVRQAPGKGLEWVANIKQDGSEKYYVDSVKGRFTISRDNAKNSLYLQMNSLRAEDTAVYYCARWSHYYDSSGLDYWGQGTLVTVSS

SEQ ID NO: 185 - protein, 107 aa, Artificial Sequence; identical to SEQ ID NO: 171
  Description of Artificial Sequence: Synthetic polypeptide

SEQ ID NO: 186 - protein, 123 aa, Artificial Sequence
  Description of Artificial Sequence: Synthetic polypeptide
QVQLVESGAEVKKPGSSVKVSCKASGGTFSSYAISWVRQAPGQGLEWMGGIIPIFGTANYAQKFQGRVTITADKSTSTAYMELSSLRSEDTAVYYCARTHLPYSYGLGGFDYWGQGTLVTVSS

SEQ ID NO: 187 - protein, 112 aa, Artificial Sequence
  Description of Artificial Sequence: Synthetic polypeptide
QSVLTQPPSVSGAPGQRVTISCTGSSSNIGAGYDVHWYQQLPGTAPKLLIYGNSNRPSGVPDRFSGSKSGTSASLAITGLQAEDEADYYCQSYDSSLSGPVVFGGGTKVTVL

SEQ ID NO: 188 - protein, 126 aa, Artificial Sequence
  Description of Artificial Sequence: Synthetic polypeptide
EVQLVQSGAEVKKPGSSVKVSCKASGGTFSSYAISWVRQAPGQGLEWMGGIIPIFGTANYAQKFQGRVTITADESTSTAYMELSSLRSEDTAVYYCARDPSRDYYGSGRFSWFDPWGQGTLVTVSS

SEQ ID NO: 189 - protein, 111 aa, Artificial Sequence
  Description of Artificial Sequence: Synthetic polypeptide
QSVLTQPPSASGTPGQRVTISCSGSSSNIGSNYVYWYQQLPGTAPKLLIYRNNQRPSGVPDRFSGSKSGTSASLAISGLRSEDEADYYCAAWDDSLSGRGVFGGGTKLTVL

SEQ ID NO: 190 - protein, 126 aa, Artificial Sequence
  Description of Artificial Sequence: Synthetic polypeptide
QVQLVQSGAEVKKPGASVKVSCKASGYTFTSYGISWVRQAPGQGLEWMGWISAYNGNTNYAQKLQGRVTMTTDTSTSTAYMELRSLRSDDTAVYYCARDIIRYCSSTSCYRGIDYWGQGTLVTVSS

SEQ ID NO: 191 - protein, 111 aa, Artificial Sequence
  Description of Artificial Sequence: Synthetic polypeptide
QSALTQPASVSGSPGQSITISCTGTSSDVGGYNYVSWYQQHPGKAPKLMIYDVSNRPSGVSNRFSGSKSGNTASLTISGLQAEDEADYYCSSYTSSSPHVVSGGGTKLTVL

SEQ ID NO: 192 - protein, 120 aa, Artificial Sequence
  Description of Artificial Sequence: Synthetic polypeptide
QVQLVESGGGVVQPGRSLRLSCAASGFTFSSYGMHWVRQAPGKGLEWVAVISYDGSNKYYADSVKGRFTISRDNSKNTLYLQMNSLRAEDTAVYYCARDGTDYRGAFDIWGQGTMVTVSS

SEQ ID NO: 193 - protein, 113 aa, Artificial Sequence
  Description of Artificial Sequence: Synthetic polypeptide
DIQLTQSPDSLAVPLGERATINCKSSQSVLYSSNNKNYLAWYQQKPGQPPKLLIYWASTRESGVPDRFSGSGSGTDFTLTISSLQAEDVAVYYCQQYYSTPLTFGQGTKLEIK

SEQ ID NO: 194 - protein, 121 aa, Artificial Sequence
  Description of Artificial Sequence: Synthetic polypeptide
EVQLVQSGAEVKKPGSSVRVSCKASGGTFSSYAISWVRQAPGQGLEWMGGIIPIFGTANYAQKFQGRVTITADKSTSTAYMELSSLRSEDTAVYYCARGGGRWLHSRLDVWGQGTTVTVSS

SEQ ID NO: 195 - protein, 112 aa, Artificial Sequence
  Description of Artificial Sequence: Synthetic polypeptide
QSVLTQPPSVSGAPGQRVTISCTGSSSNIGAGYDVHWYQQFPGTAPKLLIFGNNNRPSGVPDRFSGSKSGTSASLAITGLQAEDEANYYCQSYDRSLSGPVVFGGGTKLTVL

SEQ ID NO: 196 - protein, 119 aa, Artificial Sequence
  Description of Artificial Sequence: Synthetic polypeptide
EVQLVESGGGVVQPGRSLRLSCAASGFTFSSYGMHWVRQAPGKGLEWVAVISYDGSNKYYADSVKGRFTISRDNSKNTLYLQMNSLRAEDTAVYYCAKDAGDLGAFDIWGQGTMVTVSS

SEQ ID NO: 197 - protein, 113 aa, Artificial Sequence
  Description of Artificial Sequence: Synthetic polypeptide
DIVMTQSPDSLAVSLGERATINCKSSQSVLYSSNNKNYLAWYQQKPGQPPKLLIYWASTRESGVPDRFSGSGSGTDFTLTISSLQAEDVAVYYCQQYYSTPLTFGPGTKVEIK

SEQ ID NO: 198 - protein, 122 aa, Artificial Sequence
  Description of Artificial Sequence: Synthetic polypeptide
QVQLVQSGGGVVQPGRSLRLSCAASGFTFSSYAMHWVRQAPGKGLEWVAVISYDGSNKYYADSVKGRFTISRDNSKNTLYLQMNSLRAEDTAVYYCARGRVYYYDSSGYSYWGQGTLVTVSS

SEQ ID NO: 199 - protein, 112 aa, Artificial Sequence
  Description of Artificial Sequence: Synthetic polypeptide
QSVLTQPPSVSGAPGQRVTISCTGSSSNIGAGYDVHWYQQLPGTAPKLLIYGNSNRPSGVPDRFSGSKSGTSASLAITGLQAEDEADYYCQSYDSSLSGREVFGTGTKLTVL

SEQ ID NO: 200 - protein, 122 aa, Artificial Sequence
  Description of Artificial Sequence: Synthetic polypeptide
QVQLVESGAEVKKPGSSVKVSCKASGGTFSSYAISWVRQAPGQGLEWMGGIIPIFGTANYAQKFQGRVTITADESTSTAYMELSSLRSEDTAVYYCARPLYAPRFGYGMDVWGQGTLVTVSS

SEQ ID NO: 201 - protein, 110 aa, Artificial Sequence
  Description of Artificial Sequence: Synthetic polypeptide
QSVLTQPPSASGTPGQRVTISCSGSSSNIGSNYVYWYQQLPGTAPKLLIYRNNQRPSGVPDRFSGSKSGTSASLAISGLRSEDEADYYCAAWDDSLSGWVFGGGTQLTVL

SEQ ID NO: 202 - protein, 119 aa, Artificial Sequence
  Description of Artificial Sequence: Synthetic polypeptide
EVQLLESGGGLVQPGGSLRLSCAASGFTFSSYAMSWVRQAPGKGLEWVSAISGSGGSTYYADSVKGRFTISRDNSKNTLYLQMNSLRAEDTAVYYCAKDRGGQRGFDYWGQGTLVTVSS

SEQ ID NO: 203 - protein, 110 aa, Artificial Sequence
  Description of Artificial Sequence: Synthetic polypeptide
QSVLTQPPSASGTPGQRVTISCSGSSSNIGSNYVYWYQQLPGTAPKLLIYRNNQRPSGVPDRFSGSKSGTSASLAISGLRSEDEADYYCAAWDDSLSGLVFGGGTKLTVL

SEQ ID NO: 204 - protein, 5 aa, Artificial Sequence
  Description of Artificial Sequence: Synthetic peptide
SYAIS

SEQ ID NO: 205 - protein, 17 aa, Artificial Sequence
  Description of Artificial Sequence: Synthetic peptide
GIIPIFGTANYAQKFQG

SEQ ID NO: 206 - protein, 13 aa, Artificial Sequence
  Description of Artificial Sequence: Synthetic peptide
DGGRYSYGRSFDY

SEQ ID NO: 207 - protein, 14 aa, Artificial Sequence
  Description of Artificial Sequence: Synthetic peptide
TGSSSNIGAGYDVH

SEQ ID NO: 208 - protein, 7 aa, Artificial Sequence
  Description of Artificial Sequence: Synthetic peptide
GNSNRPS

SEQ ID NO: 209 - protein, 12 aa, Artificial Sequence
  Description of Artificial Sequence: Synthetic peptide
QSYDSSLSGPVV

SEQ ID NO: 210 - protein, 5 aa, Artificial Sequence
  Description of Artificial Sequence: Synthetic peptide
SYAIS

SEQ ID NO: 211 - protein, 17 aa, Artificial Sequence
  Description of Artificial Sequence: Synthetic peptide
GIIPIFGTANYAQKFQG

SEQ ID NO: 212 - protein, 13 aa, Artificial Sequence
  Description of Artificial Sequence: Synthetic peptide
DILRLSVSSGMDV

SEQ ID NO: 213 - protein, 13 aa, Artificial Sequence
  Description of Artificial Sequence: Synthetic peptide
SGGSSNIGSNYVY

SEQ ID NO: 214 - protein, 7 aa, Artificial Sequence
  Description of Artificial Sequence: Synthetic peptide
RNNQRPS

SEQ ID NO: 215 - protein, 12 aa, Artificial Sequence
  Description of Artificial Sequence: Synthetic peptide
AAWDDSLSGHVV

SEQ ID NO: 216 - protein, 5 aa, Artificial Sequence
  Description of Artificial Sequence: Synthetic peptide
SYAIS

SEQ ID NO: 217 - protein, 17 aa, Artificial Sequence
  Description of Artificial Sequence: Synthetic peptide
GIIPIFGTANYAQKFQG

SEQ ID NO: 218 - protein, 13 aa, Artificial Sequence
  Description of Artificial Sequence: Synthetic peptide
DILRLSVSSGMDV

SEQ ID NO: 219 - protein, 13 aa, Artificial Sequence
  Description of Artificial Sequence: Synthetic peptide
SGSSSNIGGNYVY

SEQ ID NO: 220 - protein, 7 aa, Artificial Sequence
  Description of Artificial Sequence: Synthetic peptide
RNNQRPS

SEQ ID NO: 221 - protein, 11 aa, Artificial Sequence
  Description of Artificial Sequence: Synthetic peptide
AAWDDSLSGWV

SEQ ID NO: 222 - protein, 5 aa, Artificial Sequence
  Description of Artificial Sequence: Synthetic peptide
SYAIS

SEQ ID NO: 223 - protein, 17 aa, Artificial Sequence
  Description of Artificial Sequence: Synthetic peptide
GIIPIFGTANYAQKFQG

SEQ ID NO: 224 - protein, 13 aa, Artificial Sequence
  Description of Artificial Sequence: Synthetic peptide
DILRLSVSSGMDV

SEQ ID NO: 225 - protein, 13 aa, Artificial Sequence
  Description of Artificial Sequence: Synthetic peptide
SGSSSNIGSNYVY

SEQ ID NO: 226 - protein, 7 aa, Artificial Sequence
  Description of Artificial Sequence: Synthetic peptide
RNNQRPS

SEQ ID NO: 227 - protein, 11 aa, Artificial Sequence
  Description of Artificial Sequence: Synthetic peptide
AAWDDSLSAVV

SEQ ID NO: 228 - protein, 5 aa, Artificial Sequence
  Description of Artificial Sequence: Synthetic peptide
SYAIS

SEQ ID NO: 229 - protein, 17 aa, Artificial Sequence
  Description of Artificial Sequence: Synthetic peptide
GIIPIFGTANYAQKFQG

SEQ ID NO: 230 - protein, 13 aa, Artificial Sequence
  Description of Artificial Sequence: Synthetic peptide
DILRLSVSSGMDV

SEQ ID NO: 231 - protein, 13 aa, Artificial Sequence
  Description of Artificial Sequence: Synthetic peptide
SGSSSNIGSNYVY

SEQ ID NO: 232 - protein, 7 aa, Artificial Sequence
  Description of Artificial Sequence: Synthetic peptide
RNNQRPS

SEQ ID NO: 233 - protein, 13 aa, Artificial Sequence
  Description of Artificial Sequence: Synthetic peptide
AAWDDSLSGPSVV

SEQ ID NO: 234 - protein, 5 aa, Artificial Sequence
  Description of Artificial Sequence: Synthetic peptide
SYAIS

SEQ ID NO: 235 - protein, 17 aa, Artificial Sequence
  Description of Artificial Sequence: Synthetic peptide
GIIPIFGTANYAQKFQG

SEQ ID NO: 236 - protein, 12 aa, Artificial Sequence
  Description of Artificial Sequence: Synthetic peptide
PLRPLHYYGMDV

SEQ ID NO: 237 - protein, 13 aa, Artificial Sequence
  Description of Artificial Sequence: Synthetic peptide
SGSSSNIGSNYVY

SEQ ID NO: 238 - protein, 7 aa, Artificial Sequence
  Description of Artificial Sequence: Synthetic peptide
RNNQRPS

SEQ ID NO: 239 - protein, 11 aa, Artificial Sequence
  Description of Artificial Sequence: Synthetic peptide
AAWDDSLTEGV

SEQ ID NO: 240 - protein, 5 aa, Artificial Sequence
  Description of Artificial Sequence: Synthetic peptide
SYGIS

SEQ ID NO: 241 - protein, 17 aa, Artificial Sequence
  Description of Artificial Sequence: Synthetic peptide
WIGAYNGNTNYAQKLQG

SEQ ID NO: 242 - protein, 14 aa, Artificial Sequence
  Description of Artificial Sequence: Synthetic peptide
DLRRYSSSWDGPGY

SEQ ID NO: 243 - protein, 14 aa, Artificial Sequence
  Description of Artificial Sequence: Synthetic peptide
TGTSSDVGGYNYVS

SEQ ID NO: 244 - protein, 7 aa, Artificial Sequence
  Description of Artificial Sequence: Synthetic peptide
DVSNRPS

SEQ ID NO: 245 - protein, 10 aa, Artificial Sequence
  Description of Artificial Sequence: Synthetic peptide
SSYTSSSTRV

SEQ ID NO: 246 - protein, 5 aa, Artificial Sequence
  Description of Artificial Sequence: Synthetic peptide
SYGMH

SEQ ID NO: 247 - protein, 17 aa, Artificial Sequence
  Description of Artificial Sequence: Synthetic peptide
VISYDGSNKYYADSVKG

SEQ ID NO: 248 - protein, 13 aa, Artificial Sequence
  Description of Artificial Sequence: Synthetic peptide
SGWRYYYYYGMDV

SEQ ID NO: 249 - protein, 14 aa, Artificial Sequence
  Description of Artificial Sequence: Synthetic peptide
TGSSSNIGAGYDVH

SEQ ID NO: 250 - protein, 7 aa, Artificial Sequence
  Description of Artificial Sequence: Synthetic peptide
GNSNRPS

SEQ ID NO: 251 - protein, 11 aa, Artificial Sequence
  Description of Artificial Sequence: Synthetic peptide
QSYDSSLSGSV

SEQ ID NO: 252 - protein, 5 aa, Artificial Sequence
  Description of Artificial Sequence: Synthetic peptide
SYAIS

SEQ ID NO: 253 - protein, 17 aa, Artificial Sequence
  Description of Artificial Sequence: Synthetic peptide
GIIPIFGTANYAQKFQG

SEQ ID NO: 254 - protein, 13 aa, Artificial Sequence
  Description of Artificial Sequence: Synthetic peptide
DILRLSVSSGMDV

SEQ ID NO: 255 - protein, 13 aa, Artificial Sequence
  Description of Artificial Sequence: Synthetic peptide
SGSSSNIGSNYVY

SEQ ID NO: 256 - protein, 7 aa, Artificial Sequence
  Description of Artificial Sequence: Synthetic peptide
RNNQRPS

SEQ ID NO: 257 - protein, 11 aa, Artificial Sequence
  Description of Artificial Sequence: Synthetic peptide
AAWDDSLSGVV

SEQ ID NO: 258 - protein, 5 aa, Artificial Sequence
  Description of Artificial Sequence: Synthetic peptide
SYAIS

SEQ ID NO: 259 - protein, 17 aa, Artificial Sequence
  Description of Artificial Sequence: Synthetic peptide
GIIPIFGTANYAQKFQG

SEQ ID NO: 260 - protein, 17 aa, Artificial Sequence
  Description of Artificial Sequence: Synthetic peptide
DPSRDYYGSGRFSWFDP

SEQ ID NO: 261 - protein, 13 aa, Artificial Sequence
  Description of Artificial Sequence: Synthetic peptide
SGSSSNIGSNYVY

SEQ ID NO: 262 - protein, 7 aa, Artificial Sequence
  Description of Artificial Sequence: Synthetic peptide
RNNQRPS

SEQ ID NO: 263 - protein, 12 aa, Artificial Sequence
  Description of Artificial Sequence: Synthetic peptide
AAWDDSLSGRGV

SEQ ID NO: 264 - protein, 5 aa, Artificial Sequence
  Description of Artificial Sequence: Synthetic peptide
SYAIS

SEQ ID NO: 265 - protein, 17 aa, Artificial Sequence
  Description of Artificial Sequence: Synthetic peptide
GIIPIFGTANYAQKFQG

SEQ ID NO: 266 - protein, 18 aa, Artificial Sequence
  Description of Artificial Sequence: Synthetic peptide
DRGRRYCSGGSCPNAFDI

SEQ ID NO: 267 - protein, 11 aa, Artificial Sequence
  Description of Artificial Sequence: Synthetic peptide
RASQSVSSNLA

SEQ ID NO: 268 - protein, 7 aa, Artificial Sequence
  Description of Artificial Sequence: Synthetic peptide
GASTRAT

SEQ ID NO: 269 - protein, 11 aa, Artificial Sequence
  Description of Artificial Sequence: Synthetic peptide
QQYNNWPPALT

SEQ ID NO: 270 - protein, 5 aa, Artificial Sequence
  Description of Artificial Sequence: Synthetic peptide
SYAIS

SEQ ID NO: 271 - protein, 17 aa, Artificial Sequence
  Description of Artificial Sequence: Synthetic peptide
GIIPIFGTANYAQKFQG

SEQ ID NO: 272 - protein, 12 aa, Artificial Sequence
  Description of Artificial Sequence: Synthetic peptide
GGGRWLHSRLDV

SEQ ID NO: 273 - protein, 14 aa, Artificial Sequence
  Description of Artificial Sequence: Synthetic peptide
TGSSSNIGAGYDVH

SEQ ID NO: 274 - protein, 7 aa, Artificial Sequence
  Description of Artificial Sequence: Synthetic peptide
GNNNRPS

SEQ ID NO: 275 - protein, 12 aa, Artificial Sequence
  Description of Artificial Sequence: Synthetic peptide
QSYDRSLSGPVV

SEQ ID NO: 276 - protein, 5 aa, Artificial Sequence
  Description of Artificial Sequence: Synthetic peptide
SYAIS

SEQ ID NO: 277 - protein, 17 aa, Artificial Sequence
  Description of Artificial Sequence: Synthetic peptide
GIIPIFGTANYAQKFQG

SEQ ID NO: 278 - protein, 17 aa, Artificial Sequence
  Description of Artificial Sequence: Synthetic peptide
GGYVWGSYRQNSNWFDP

SEQ ID NO: 279 - protein, 13 aa, Artificial Sequence
  Description of Artificial Sequence: Synthetic peptide
SGSSSNIGSNYVY

SEQ ID NO: 280 - protein, 7 aa, Artificial Sequence
  Description of Artificial Sequence: Synthetic peptide
RNNQRPS

SEQ ID NO: 281 - protein, 11 aa, Artificial Sequence
  Description of Artificial Sequence: Synthetic peptide
AAWDDSLSGWV

SEQ ID NO: 282 - protein, 5 aa, Artificial Sequence
  Description of Artificial Sequence: Synthetic peptide
SYAIS

SEQ ID NO: 283 - protein, 17 aa, Artificial Sequence
  Description of Artificial Sequence: Synthetic peptide
GIIPIFGTANYAQKFQG

SEQ ID NO: 284 - protein, 13 aa, Artificial Sequence
  Description of Artificial Sequence: Synthetic peptide
PLYAPRFGYGMDV

SEQ ID NO: 285 - protein, 13 aa, Artificial Sequence
  Description of Artificial Sequence: Synthetic peptide
SGSSSNIGSNYVY

SEQ ID NO: 286 - protein, 7 aa, Artificial Sequence
  Description of Artificial Sequence: Synthetic peptide
RNNQRPS

SEQ ID NO: 287 - protein, 11 aa, Artificial Sequence
  Description of Artificial Sequence: Synthetic peptide
AAWDDSLSGWV

SEQ ID NO: 288 - protein, 5 aa, Artificial Sequence
  Description of Artificial Sequence: Synthetic peptide
SYAIS

SEQ ID NO: 289 - protein, 17 aa, Artificial Sequence
  Description of Artificial Sequence: Synthetic peptide
GIIPIFGTANYAQKFQG

SEQ ID NO: 290 - protein, 14 aa, Artificial Sequence
  Description of Artificial Sequence: Synthetic peptide
THLPYSYGLGGFDY

SEQ ID NO: 291 - protein, 14 aa, Artificial Sequence
  Description of Artificial Sequence: Synthetic peptide
TGSSSNIGAGYDVH

SEQ ID NO: 292 - protein, 7 aa, Artificial Sequence
  Description of Artificial Sequence: Synthetic peptide
GNSNRPS

SEQ ID NO: 293 - protein, 12 aa, Artificial Sequence
  Description of Artificial Sequence: Synthetic peptide
QSYDSSLSGPVV

SEQ ID NO: 294 - protein, 5 aa, Artificial Sequence
  Description of Artificial Sequence: Synthetic peptide
SYAMH

SEQ ID NO: 295 - protein, 17 aa, Artificial Sequence
  Description of Artificial Sequence: Synthetic peptide
VISYDGSNKYYADSVKG

SEQ ID NO: 296 - protein, 13 aa, Artificial Sequence
  Description of Artificial Sequence: Synthetic peptide
GRVYYYDSSGYSY

SEQ ID NO: 297 - protein, 14 aa, Artificial Sequence
  Description of Artificial Sequence: Synthetic peptide
TGSSSNIGAGYDVH

SEQ ID NO: 298 - protein, 7 aa, Artificial Sequence
  Description of Artificial Sequence: Synthetic peptide
GNSNRPS

SEQ ID NO: 299 - protein, 12 aa, Artificial Sequence
  Description of Artificial Sequence: Synthetic peptide
QSYDSSLSGREV

SEQ ID NO: 300 - protein, 5 aa, Artificial Sequence
  Description of Artificial Sequence: Synthetic peptide
SYAMS

SEQ ID NO: 301 - protein, 17 aa, Artificial Sequence
  Description of Artificial Sequence: Synthetic peptide
AISGSGGSTYYADSVKG

SEQ ID NO: 302 - protein, 10 aa, Artificial Sequence
  Description of Artificial Sequence: Synthetic peptide
DRGGQRGFDY

SEQ ID NO: 303 - protein, 13 aa, Artificial Sequence
  Description of Artificial Sequence: Synthetic peptide
SGSSSNIGSNYVY

SEQ ID NO: 304 - protein, 7 aa, Artificial Sequence
  Description of Artificial Sequence: Synthetic peptide
RNNQRPS

SEQ ID NO: 305 - protein, 11 aa, Artificial Sequence
  Description of Artificial Sequence: Synthetic peptide
AAWDDSLSGLV

SEQ ID NO: 306 - protein, 5 aa, Artificial Sequence
  Description of Artificial Sequence: Synthetic peptide
SYGIS

SEQ ID NO: 307 - protein, 17 aa, Artificial Sequence
  Description of Artificial Sequence: Synthetic peptide
WISAYNGNTNYAQKLQG

SEQ ID NO: 308 - protein, 17 aa, Artificial Sequence
  Description of Artificial Sequence: Synthetic peptide
DIIRYCSSTSCYRGIDY

SEQ ID NO: 309 - protein, 14 aa, Artificial Sequence
  Description of Artificial Sequence: Synthetic peptide
TGTSSDVGGYNYVS

SEQ ID NO: 310 - protein, 7 aa, Artificial Sequence
  Description of Artificial Sequence: Synthetic peptide
DVSNRPS

SEQ ID NO: 311 - protein, 11 aa, Artificial Sequence
  Description of Artificial Sequence: Synthetic peptide
SSYTSSSPHVV

SEQ ID NO: 312 - protein, 5 aa, Artificial Sequence
  Description of Artificial Sequence: Synthetic peptide
SYGMH

SEQ ID NO: 313 - protein, 17 aa, Artificial Sequence
  Description of Artificial Sequence: Synthetic peptide
VISYDGSNKYYADSVKG

SEQ ID NO: 314 - protein, 10 aa, Artificial Sequence
  Description of Artificial Sequence: Synthetic peptide
DAADMGAFDY

SEQ ID NO: 315 - protein, 17 aa, Artificial Sequence
  Description of Artificial Sequence: Synthetic peptide
KSSQSVLYSSNNKNYLA

SEQ ID NO: 316 - protein, 7 aa, Artificial Sequence
  Description of Artificial Sequence: Synthetic peptide
WASARES

SEQ ID NO: 317 - protein, 9 aa, Artificial Sequence
  Description of Artificial Sequence: Synthetic peptide
QQYYSTPLT

SEQ ID NO: 318 - protein, 5 aa, Artificial Sequence
  Description of Artificial Sequence: Synthetic peptide
SYGMH

SEQ ID NO: 319 - protein, 17 aa, Artificial Sequence
  Description of Artificial Sequence: Synthetic peptide
VISYDGSNKYYADSVKG

SEQ ID NO: 320 - protein, 10 aa, Artificial Sequence
  Description of Artificial Sequence: Synthetic peptide
DAGDLGAFDI

SEQ ID NO: 321 - protein, 17 aa, Artificial Sequence
  Description of Artificial Sequence: Synthetic peptide
KSSQSVLYSSNNKNYLA

SEQ ID NO: 322 - protein, 7 aa, Artificial Sequence
  Description of Artificial Sequence: Synthetic peptide
WASTRES

SEQ ID NO: 323 - protein, 9 aa, Artificial Sequence
  Description of Artificial Sequence: Synthetic peptide
QQYYSTPLT

SEQ ID NO: 324 - protein, 5 aa, Artificial Sequence
  Description of Artificial Sequence: Synthetic peptide
SYGMH

SEQ ID NO: 325 - protein, 17 aa, Artificial Sequence
  Description of Artificial Sequence: Synthetic peptide
VISYDGSNKYYADSVKG

SEQ ID NO: 326 - protein, 10 aa, Artificial Sequence
  Description of Artificial Sequence: Synthetic peptide
DGGDSGSLDY

SEQ ID NO: 327 - protein, 17 aa, Artificial Sequence
  Description of Artificial Sequence: Synthetic peptide
KSSQSVLYSSNNKNYLA

SEQ ID NO: 328 - protein, 7 aa, Artificial Sequence
  Description of Artificial Sequence: Synthetic peptide
WASTRES

SEQ ID NO: 329 - protein, 9 aa, Artificial Sequence
  Description of Artificial Sequence: Synthetic peptide
QQYYSTPLT

SEQ ID NO: 330 - protein, 5 aa, Artificial Sequence
  Description of Artificial Sequence: Synthetic peptide
SYGMH

SEQ ID NO: 331 - protein, 17 aa, Artificial Sequence
  Description of Artificial Sequence: Synthetic peptide
VISYDGSNKYYADSVKG

SEQ ID NO: 332 - protein, 11 aa, Artificial Sequence
  Description of Artificial Sequence: Synthetic peptide
DGTDYRGAFDI

SEQ ID NO: 333 - protein, 17 aa, Artificial Sequence
  Description of Artificial Sequence: Synthetic peptide
KSSQSVLYSSNNKNYLA

SEQ ID NO: 334 - protein, 7 aa, Artificial Sequence
  Description of Artificial Sequence: Synthetic peptide
WASTRES

SEQ ID NO: 335 - protein, 9 aa, Artificial Sequence
  Description of Artificial Sequence: Synthetic peptide
QQYYSTPLT

SEQ ID NO: 336 - protein, 5 aa, Artificial Sequence
  Description of Artificial Sequence: Synthetic peptide
SYGMH

SEQ ID NO: 337 - protein, 17 aa, Artificial Sequence
  Description of Artificial Sequence: Synthetic peptide
VISYDGSNKYYADSVKG

SEQ ID NO: 338 - protein, 13 aa, Artificial Sequence
  Description of Artificial Sequence: Synthetic peptide
GVPRYYYYYGMDV

SEQ ID NO: 339 - protein, 14 aa, Artificial Sequence
  Description of Artificial Sequence: Synthetic peptide
TGSSSNIGAGYDVH

SEQ ID NO: 340 - protein, 7 aa, Artificial Sequence
  Description of Artificial Sequence: Synthetic peptide
GNSNRPS

SEQ ID NO: 341 - protein, 11 aa, Artificial Sequence
  Description of Artificial Sequence: Synthetic peptide
QSYDSSLSGSV

SEQ ID NO: 342 - protein, 5 aa, Artificial Sequence
  Description of Artificial Sequence: Synthetic peptide
SYSMN

SEQ ID NO: 343 - protein, 17 aa, Artificial Sequence
  Description of Artificial Sequence: Synthetic peptide
AISGSGGSTYYADSVKG

SEQ ID NO: 344 - protein, 13 aa, Artificial Sequence
  Description of Artificial Sequence: Synthetic peptide
ARGYSYGSDAFDI

SEQ ID NO: 345 - protein, 13 aa, Artificial Sequence
  Description of Artificial Sequence: Synthetic peptide
SGSSSNIGSNYVY

SEQ ID NO: 346 - protein, 7 aa, Artificial Sequence
  Description of Artificial Sequence: Synthetic peptide
RNNQRPS

SEQ ID NO: 347 - protein, 11 aa, Artificial Sequence
  Description of Artificial Sequence: Synthetic peptide
AAWDDSLSGVV

SEQ ID NO: 348 - protein, 5 aa, Artificial Sequence
  Description of Artificial Sequence: Synthetic peptide
SYWMS

SEQ ID NO: 349 - protein, 17 aa, Artificial Sequence
  Description of Artificial Sequence: Synthetic peptide
NIKQDGSEKYYVDSVKG

SEQ ID NO: 350 - protein, 11 aa, Artificial Sequence
  Description of Artificial Sequence: Synthetic peptide
PAGQLLYGMDV

SEQ ID NO: 351 - protein, 11 aa, Artificial Sequence
  Description of Artificial Sequence: Synthetic peptide
SGDALPKQYAY

SEQ ID NO: 352 - protein, 7 aa, Artificial Sequence
  Description of Artificial Sequence: Synthetic peptide
KDSERPS

SEQ ID NO: 353 - protein, 10 aa, Artificial Sequence
  Description of Artificial Sequence: Synthetic peptide
QSADSSGTWV

SEQ ID NO: 354 - protein, 5 aa, Artificial Sequence
  Description of Artificial Sequence: Synthetic peptide
SYWMS

SEQ ID NO: 355 - protein, 17 aa, Artificial Sequence
  Description of Artificial Sequence: Synthetic peptide
NIKQDGSEKYYVDSVKG

SEQ ID NO: 356 - protein, 12 aa, Artificial Sequence
  Description of Artificial Sequence: Synthetic peptide
WSHYYDSSGLDY

SEQ ID NO: 357 - protein, 11 aa, Artificial Sequence
  Description of Artificial Sequence: Synthetic peptide
SGDALPKQYAY

SEQ ID NO: 358 - protein, 7 aa, Artificial Sequence
  Description of Artificial Sequence: Synthetic peptide
KDSERPS

SEQ ID NO: 359 - protein, 10 aa, Artificial Sequence
  Description of Artificial Sequence: Synthetic peptide
QSADSSGTWV

SEQ ID NO: 360 - protein, 10 aa, Artificial Sequence
  Description of Artificial Sequence: Synthetic peptide
RNIFSLYRVD

SEQ ID NO: 361 - protein, 13 aa, Artificial Sequence
  Description of Artificial Sequence: Synthetic peptide
GSTSGGTTTYADA

SEQ ID NO: 362 - protein, 9 aa, Artificial Sequence
  Description of Artificial Sequence: Synthetic peptide
HAHDHWRDS

SEQ ID NO: 363 - protein, 10 aa, Artificial Sequence
  Description of Artificial Sequence: Synthetic peptide
RNIFSMYRVD

SEQ ID NO: 364 - protein, 13 aa, Artificial Sequence
  Description of Artificial Sequence: Synthetic peptide
GITSGGTTSYADA

SEQ ID NO: 365 - protein, 9 aa, Artificial Sequence
  Description of Artificial Sequence: Synthetic peptide
HAHDHWRDS

SEQ ID NO: 366 - protein, 10 aa, Artificial Sequence
  Description of Artificial Sequence: Synthetic peptide
RNIASLYRVD

SEQ ID NO: 367 - protein, 13 aa, Artificial Sequence
  Description of Artificial Sequence: Synthetic peptide
GRTSGGTTTYLDA

SEQ ID NO: 368 - protein, 9 aa, Artificial Sequence
  Description of Artificial Sequence: Synthetic peptide
HAHDHWRDS

SEQ ID NO: 369 - protein, 10 aa, Artificial Sequence
  Description of Artificial Sequence: Synthetic peptide
GRTGSSYAMG

SEQ ID NO: 370 - protein, 14 aa, Artificial Sequence
  Description of Artificial Sequence: Synthetic peptide
AITWSGGITAYADS

SEQ ID NO: 371 - protein, 12 aa, Artificial Sequence
  Description of Artificial Sequence: Synthetic peptide
AAGVTGSPSFDS

SEQ ID NO: 372 - protein, 10 aa, Artificial Sequence
  Description of Artificial Sequence: Synthetic peptide
GRTFSSYAMG

SEQ ID NO: 373 - protein, 14 aa, Artificial Sequence
  Description of Artificial Sequence: Synthetic peptide
AISGSGGSIYYGDS

SEQ ID NO: 374 - protein, 12 aa, Artificial Sequence
  Description of Artificial Sequence: Synthetic peptide
AAGPLGSPDFDS

SEQ ID NO: 375 - protein, 10 aa, Artificial Sequence
  Description of Artificial Sequence: Synthetic peptide
GRTFSSYAMG

SEQ ID NO: 376 - protein, 14 aa, Artificial Sequence
  Description of Artificial Sequence: Synthetic peptide
AISGSGGSIYYGDS

SEQ ID NO: 377 - protein, 12 aa, Artificial Sequence
  Description of Artificial Sequence: Synthetic peptide
AAGPLGSPDFDS

SEQ ID NO: 378 - protein, 10 aa, Artificial Sequence
  Description of Artificial Sequence: Synthetic peptide
GRTGSSYAMG

SEQ ID NO: 379 - protein, 14 aa, Artificial Sequence
  Description of Artificial Sequence: Synthetic peptide
AITWSGGITAYADS

SEQ ID NO: 380 - protein, 12 aa, Artificial Sequence
  Description of Artificial Sequence: Synthetic peptide
AAGVTGSPSFDS

SEQ ID NO: 381 - protein, 10 aa, Artificial Sequence
  Description of Artificial Sequence: Synthetic peptide
GRTFSSYAMG

SEQ ID NO: 382 - protein, 14 aa, Artificial Sequence
  Description of Artificial Sequence: Synthetic peptide
AISGSGGVTFYAHS

SEQ ID NO: 383 - protein, 12 aa, Artificial Sequence
  Description of Artificial Sequence: Synthetic peptide
AGGAHGSPDFGS

SEQ ID NO: 384 - protein, 10 aa, Artificial Sequence
  Description of Artificial Sequence: Synthetic peptide
GSIGSIYAMG

SEQ ID NO: 385 - protein, 13 aa, Artificial Sequence
  Description of Artificial Sequence: Synthetic peptide
TTTSGGTTNYADS

SEQ ID NO: 386 - protein, 9 aa, Artificial Sequence
  Description of Artificial Sequence: Synthetic peptide
KIQTHWYVY

SEQ ID NO: 387 - protein, 10 aa, Artificial Sequence
  Description of Artificial Sequence: Synthetic peptide
GSIGSIYRKG

SEQ ID NO: 388 - protein, 13 aa, Artificial Sequence
  Description of Artificial Sequence: Synthetic peptide
TITSAGTTNYADS

SEQ ID NO: 389 - protein, 9 aa, Artificial Sequence
  Description of Artificial Sequence: Synthetic peptide
NFQTHWYVY

SEQ ID NO: 390 - protein, 10 aa, Artificial Sequence
  Description of Artificial Sequence: Synthetic peptide
KNIFSIYRVD

SEQ ID NO: 391 - protein, 13 aa, Artificial Sequence
  Description of Artificial Sequence: Synthetic peptide
GWTSGGSTSYADA

SEQ ID NO: 392 - protein, 9 aa, Artificial Sequence
  Description of Artificial Sequence: Synthetic peptide
HAHDHWRDY

SEQ ID NO: 393 - protein, 13 aa, Artificial Sequence
  Description of Artificial Sequence: Synthetic peptide
SGFTFSSYGLSWI

SEQ ID NO: 394 - protein, 12 aa, Artificial Sequence
  Description of Artificial Sequence: Synthetic peptide
SINRNGDNTYYT

SEQ ID NO: 395 - protein, 7 aa, Artificial Sequence
  Description of Artificial Sequence: Synthetic peptide
TRGGFSY

SEQ ID NO: 396 - protein, 8 aa, Artificial Sequence
  Description of Artificial Sequence: Synthetic peptide
SASSSVSY

SEQ ID NO: 397 - protein, 6 aa, Artificial Sequence
  Description of Artificial Sequence: Synthetic peptide
DTSKLA

SEQ ID NO: 398 - protein, 11 aa, Artificial Sequence
  Description of Artificial Sequence: Synthetic peptide
QQWSGFPPITF

SEQ ID NO: 399 - protein, 13 aa, Artificial Sequence
  Description of Artificial Sequence: Synthetic peptide
SGFTFSSYGLSWI

SEQ ID NO: 400 - protein, 12 aa, Artificial Sequence
  Description of Artificial Sequence: Synthetic peptide
SINRNGDNTYYT

SEQ ID NO: 401 - protein, 7 aa, Artificial Sequence
  Description of Artificial Sequence: Synthetic peptide
TRGGFSY

SEQ ID NO: 402 - protein, 8 aa, Artificial Sequence
  Description of Artificial Sequence: Synthetic peptide
SASPGVTY

SEQ ID NO: 403 - protein, 6 aa, Artificial Sequence
  Description of Artificial Sequence: Synthetic peptide
DTSNLA

SEQ ID NO: 404 - protein, 11 aa, Artificial Sequence
  Description of Artificial Sequence: Synthetic peptide
QQWSGYPPITF

SEQ ID NO: 405 - protein, 13 aa, Artificial Sequence
  Description of Artificial Sequence: Synthetic peptide
SGFTFSSYGLSWI

SEQ ID NO: 406 - protein, 12 aa, Artificial Sequence
  Description of Artificial Sequence: Synthetic peptide
SINRNGDNAYYI

SEQ ID NO: 407 - protein, 7 aa, Artificial Sequence
  Description of Artificial Sequence: Synthetic peptide
TRGGFSH

SEQ ID NO: 408 - protein, 8 aa, Artificial Sequence
  Description of Artificial Sequence: Synthetic peptide
SASSSVSY

SEQ ID NO: 409 - protein, 6 aa, Artificial Sequence
  Description of Artificial Sequence: Synthetic peptide
DTSNLA

SEQ ID NO: 410 - protein, 11 aa, Artificial Sequence
  Description of Artificial Sequence: Synthetic peptide
QQWSGYPPITF

SEQ ID NO: 411 - protein, 13 aa, Artificial Sequence
  Description of Artificial Sequence: Synthetic peptide
SGFTFSSYGLSWV

SEQ ID NO: 412 - protein, 12 aa, Artificial Sequence
  Description of Artificial Sequence: Synthetic peptide
SINRNGGNTYYT

SEQ ID NO: 413 - protein, 7 aa, Artificial Sequence
  Description of Artificial Sequence: Synthetic peptide
ARGGFTY

SEQ ID NO: 414 - protein, 8 aa, Artificial Sequence
  Description of Artificial Sequence: Synthetic peptide
SASSSVGY

SEQ ID NO: 415 - protein, 6 aa, Artificial Sequence
  Description of Artificial Sequence: Synthetic peptide
DTSNLA

SEQ ID NO: 416 - protein, 11 aa, Artificial Sequence
  Description of Artificial Sequence: Synthetic peptide
QQWSGYPPITF

SEQ ID NO: 417 - protein, 13 aa, Artificial Sequence
  Description of Artificial Sequence: Synthetic peptide
SGFTFSNYGMSWI

SEQ ID NO: 418 - protein, 12 aa, Artificial Sequence
  Description of Artificial Sequence: Synthetic peptide
SINTSGGNTYYP

SEQ ID NO: 419 - protein, 7 aa, Artificial Sequence
  Description of Artificial Sequence: Synthetic peptide
TRGGFTH

SEQ ID NO: 420 - protein, 8 aa, Artificial Sequence
  Description of Artificial Sequence: Synthetic peptide
SASSSVSY

SEQ ID NO: 421 - protein, 6 aa, Artificial Sequence
  Description of Artificial Sequence: Synthetic peptide
DTSNLA

SEQ ID NO: 422 - protein, 11 aa, Artificial Sequence
  Description of Artificial Sequence: Synthetic peptide
QQWTGYPPITF

SEQ ID NO: 423 - protein, 13 aa, Artificial Sequence
  Description of Artificial Sequence: Synthetic peptide
SGFPFSSYGLSWV

SEQ ID NO: 424 - protein, 12 aa, Artificial Sequence
  Description of Artificial Sequence: Synthetic peptide
TINRNGDSAYYP

SEQ ID NO: 425 - protein, 7 aa, Artificial Sequence
  Description of Artificial Sequence: Synthetic peptide
TRGGFAY

SEQ ID NO: 426 - protein, 8 aa, Artificial Sequence
  Description of Artificial Sequence: Synthetic peptide
SGSSSVGY

SEQ ID NO: 427 - protein, 6 aa, Artificial Sequence
  Description of Artificial Sequence: Synthetic peptide
DTSNLA

SEQ ID NO: 428 - protein, 12 aa, Artificial Sequence
  Description of Artificial Sequence: Synthetic peptide
CQQWSGYPPITF

SEQ ID NO: 429 - protein, 13 aa, Artificial Sequence
  Description of Artificial Sequence: Synthetic peptide
SGFTFSNYGMSWI

SEQ ID NO: 430 - protein, 12 aa, Artificial Sequence
  Description of Artificial Sequence: Synthetic peptide
SINTSGGNTYYP

SEQ ID NO: 431 - protein, 7 aa, Artificial Sequence
  Description of Artificial Sequence: Synthetic peptide
TRGGFTH

SEQ ID NO: 432 - protein, 8 aa, Artificial Sequence
  Description of Artificial Sequence: Synthetic peptide
SASSSVAF

SEQ ID NO: 433 - protein, 6 aa, Artificial Sequence
  Description of Artificial Sequence: Synthetic peptide
DTSKLA

SEQ ID NO: 434 - protein, 12 aa, Artificial Sequence
  Description of Artificial Sequence: Synthetic peptide
CQQWSGYPPITF

SEQ ID NO: 435 - protein, 13 aa, Artificial Sequence
  Description of Artificial Sequence: Synthetic peptide
SGFTFSSYGLSWI

SEQ ID NO: 436 - protein, 12 aa, Artificial Sequence
  Description of Artificial Sequence: Synthetic peptide
SINRNGDNTYYT

SEQ ID NO: 437 - protein, 7 aa, Artificial Sequence
  Description of Artificial Sequence: Synthetic peptide
TRGGFSY

SEQ ID NO: 438 - protein, 8 aa, Artificial Sequence
  Description of Artificial Sequence: Synthetic peptide
SASSSVGY

SEQ ID NO: 439 - protein, 6 aa, Artificial Sequence
  Description of Artificial Sequence: Synthetic peptide
DTYNLA

SEQ ID NO: 440 - protein, 12 aa, Artificial Sequence
  Description of Artificial Sequence: Synthetic peptide
CQQWSGYPPITF

SEQ ID NO: 441 - protein, 13 aa, Artificial Sequence
  Description of Artificial Sequence: Synthetic peptide
SGFTFSSYGLSWV

SEQ ID NO: 442 - protein, 12 aa, Artificial Sequence
  Description of Artificial Sequence: Synthetic peptide
SVNRNGGNTYYT

SEQ ID NO: 443 - protein, 7 aa, Artificial Sequence
  Description of Artificial Sequence: Synthetic peptide
ARGGFTY

SEQ ID NO: 444 - protein, 8 aa, Artificial Sequence
  Description of Artificial Sequence: Synthetic peptide
SASSSVGY

SEQ ID NO: 445 - protein, 6 aa, Artificial Sequence
  Description of Artificial Sequence: Synthetic peptide
DTSHLA

SEQ ID NO: 446 - protein, 12 aa, Artificial Sequence
  Description of Artificial Sequence: Synthetic peptide
CQQWSGYPPITF

SEQ ID NO: 447 - protein, 13 aa, Artificial Sequence
  Description of Artificial Sequence: Synthetic peptide
SGFPFSSYGLSWV

SEQ ID NO: 448 - protein, 12 aa, Artificial Sequence
  Description of Artificial Sequence: Synthetic peptide
TINRNGDSAYYP

SEQ ID NO: 449 - protein, 7 aa, Artificial Sequence
  Description of Artificial Sequence: Synthetic peptide
TRGGFAY

SEQ ID NO: 450 - protein, 8 aa, Artificial Sequence
  Description of Artificial Sequence: Synthetic peptide
SASSSVGY

SEQ ID NO: 451 - protein, 6 aa, Artificial Sequence
  Description of Artificial Sequence: Synthetic peptide
DTSNLA

SEQ ID NO: 452 - protein, 12 aa, Artificial Sequence
  Description of Artificial Sequence: Synthetic peptide
CQQWSGYPPITF

SEQ ID NO: 453 - protein, 13 aa, Artificial Sequence
  Description of Artificial Sequence: Synthetic peptide
SGFTFSSYGLSWI

SEQ ID NO: 454 - protein, 12 aa, Artificial Sequence
  Description of Artificial Sequence: Synthetic peptide
SINRNGDNTYYT

SEQ ID NO: 455 - protein, 7 aa, Artificial Sequence
  Description of Artificial Sequence: Synthetic peptide
TRGGFSY

SEQ ID NO: 456 - protein, 8 aa, Artificial Sequence
  Description of Artificial Sequence: Synthetic peptide
SASSSVSY

SEQ ID NO: 457 - protein, 6 aa, Artificial Sequence
  Description of Artificial Sequence: Synthetic peptide
DTSNLA

SEQ ID NO: 458 - protein, 12 aa, Artificial Sequence
  Description of Artificial Sequence: Synthetic peptide
CQQWTGYPPITF

SEQ ID NO: 459 - protein, 13 aa, Artificial Sequence
  Description of Artificial Sequence: Synthetic peptide
SGFTFSSYGMSWV

SEQ ID NO: 460 - protein, 12 aa, Artificial Sequence
  Description of Artificial Sequence: Synthetic peptide
SINKNGGSTYYP

SEQ ID NO: 461 - protein, 7 aa, Artificial Sequence
  Description of Artificial Sequence: Synthetic peptide
TRGGFAY

SEQ ID NO: 462 - protein, 8 aa, Artificial Sequence
  Description of Artificial Sequence: Synthetic peptide
SASSSVGY

SEQ ID NO: 463 - protein, 6 aa, Artificial Sequence
  Description of Artificial Sequence: Synthetic peptide
DTSNLP

SEQ ID NO: 464 - protein, 12 aa, Artificial Sequence
  Description of Artificial Sequence: Synthetic peptide
CQQWSGYPPITF

SEQ ID NO: 465 - protein, 645 aa, Artificial Sequence
  Description of Artificial Sequence: Synthetic polypeptide
MALPVTALLLPLALLLHAARPQVQLVQSGAEVKKPGSSVKVSCKASGGTFSSYAISWVRQAPGQGLEWMGGIIPIFGTANYAQKFQGRVTITADESTSTAYMELSSLRSEDTAVYYCARDILRLSVSSGMDVWGQGTLVTVSSGSTSGSGKPGSGEGSTKGQSVLTQPPSASGTPGQRVTISCSGGSSNIGSNYVYWYQQLPGTAPKLLIYRNNQRPSGVPDRFSGSKSGTSASLAISGLRSEDEADYYCAAWDDSLSGHVVFGGGTKLTVLEQKLISEEDLNPGGGGGSGGGGSGGGGSGGGGSGSMDIQMTQSPSSLSASVGDRVTITCRASQDIRNYLNWYQQKPGKAPKLLIYYTSRLESGVPSRFSGSGSGTDYTLTISSLQPEDFATYYCQQGNTLPWTFGQGTKVEIKGGGGSGGGGSGGGGSEVQLVESGGGLVQPGGSLRLSCAASGYSFTGYTMNWVRQAPGKGLEWVALINPTKGVSTYNQKFKDRFTISVDKSKNTAYLQMNSLRAEDTAVYYCARSGYYGDSDWYFDVWGQGTLVTVSSTSGGGGSLESGQVLLESNIKVLPTWSTPVQPMALIVLGGVAGLLLFIGLGIFFCVRCRHRRRQAERMSQIKRLLSEKKTCQCPHRFQKTCSPI

SEQ ID NO: 466 - protein, 644 aa, Artificial Sequence
  Description of Artificial Sequence: Synthetic polypeptide
MALPVTALLLPLALLLHAARPQVQLVQSGAEVKKPGSSVKVSCKASGGTFSSYAISWVRQAPGQGLEWMGGIIPIFGTANYAQKFQGRVTITADESTSTAYMELSSLRSEDTAVYYCARDILRLSVSSGMDVWGQGTLVTVSSGSTSGSGKPGSGEGSTKGQSVLTQPPSASGTPGQRVTISCSGSSSNIGSNYVYWYQQLPGTAPKLLIYRNNQRPSGVPDRLSGSKSGTSASLAISGLRSEDEADYYCAAWDDSLSAVVFGGGTKLTVLEQKLISEEDLNPGGGGGSGGGGSGGGGSGGGGSGSMDIQMTQSPSSLSASVGDRVTITCRASQDIRNYLNWYQQKPGKAPKLLIYYTSRLESGVPSRFSGSGSGTDYTLTISSLQPEDFATYYCQQGNTLPWTFGQGTKVEIKGGGGSGGGGSGGGGSEVQLVESGGGLVQPGGSLRLSCAASGYSFTGYTMNWVRQAPGKGLEWVALINPTKGVSTYNQKFKDRFTISVDKSKNTAYLQMNSLRAEDTAVYYCARSGYYGDSDWYFDVWGQGTLVTVSSTSGGGGSLESGQVLLESNIKVLPTWSTPVQPMALIVLGGVAGLLLFIGLGIFFCVRCRHRRRQAERMSQIKRLLSEKKTCQCPHRFQKTCSPI

SEQ ID NO: 467 - protein, 645 aa, Artificial Sequence
  Description of Artificial Sequence: Synthetic polypeptide
MALPVTALLLPLALLLHAARPQVQLQESGGGVVQPGRSLRLSCAASGFTLSSYGMHWVRQAPGKGLEWVAVISYDGSNKYYADSVKGRFTISRDNSKNTLYLQMNSLRAEDTAVYYCAKSGWRYYYYYGMDVWGQGTLVTVSSGSTSGSGKPGSGEGSTKGQSVLTQPPSVSGAPGQRVTISCTGSSSNIGAGYDVHWYQQLPGTAPKLLIYGNSNRPSGVPDRFSGSKSGTSASLAITGLQAEDEADYYCQSYDSSLSGSVFGGGTKLTVLEQKLISEEDLNPGGGGGSGGGGSGGGGSGGGGSGSMDIQMTQSPSSLSASVGDRVTITCRASQDIRNYLNWYQQKPGKAPKLLIYYTSRLESGVPSRFSGSGSGTDYTLTISSLQPEDFATYYCQQGNTLPWTFGQGTKVEIKGGGGSGGGGSGGGGSEVQLVESGGGLVQPGGSLRLSCAASGYSFTGYTMNWVRQAPGKGLEWVALINPTKGVSTYNQKFKDRFTISVDKSKNTAYLQMNSLRAEDTAVYYCARSGYYGDSDWYFDVWGQGTLVTVSSTSGGGGSLESGQVLLESNIKVLPTWSTPVQPMALIVLGGVAGLLLFIGLGIFFCVRCRHRRRQAERMSQIKRLLSEKKTCQCPHRFQKTCSPI

SEQ ID NO: 468 - protein, 646 aa, Artificial Sequence
  Description of Artificial Sequence: Synthetic polypeptide
MALPVTALLLPLALLLHAARPQVQLVQSGAEVKKPGSSVKVSCKASGGTFSSYAISWVRQAPGQGLEWMGGIIPIFGTANYAQKFQGRVTITADESTSTAYMELSSLRSEDTAVYYCARDILRLSVSSGMDVWGQGTMVTVSSGSTSGSGKPGSGEGSTKGQSVLTQPPSASGTPGQRVTISCSGSSSNIGSNYVYWYQQLPGTAPKLLIYRNNQRPSGVPDRFSGSKSGTSASLAISGLRSEDEADYYCAAWDDSLSGPSVVFGGGTKLTVLEQKLISEEDLNPGGGGGSGGGGSGGGGSGGGGSGSMDIQMTQSPSSLSASVGDRVTITCRASQDIRNYLNWYQQKPGKAPKLLIYYTSRLESGVPSRFSGSGSGTDYTLTISSLQPEDFATYYCQQGNTLPWTFGQGTKVEIKGGGGSGGGGSGGGGSEVQLVESGGGLVQPGGSLRLSCAASGYSFTGYTMNWVRQAPGKGLEWVALINPTKGVSTYNQKFKDRFTISVDKSKNTAYLQMNSLRAEDTAVYYCARSGYYGDSDWYFDVWGQGTLVTVSSTSGGGGSLESGQVLLESNIKVLPTWSTPVQPMALIVLGGVAGLLLFIGLGIFFCVRCRHRRRQAERMSQIKRLLSEKKTCQCPHRFQKTCSPI

SEQ ID NO: 469 - protein, 645 aa, Artificial Sequence
  Description of Artificial Sequence: Synthetic polypeptide
MALPVTALLLPLALLLHAARPQVQLVQSGAEVKKPGASVKVSCKASGYTFTSYGISWVRQAPGQGLEWMGWIGAYNGNTNYAQKLQGRVTMTTDTSTSTAYMELRSLRSDDTAVYYCARDLRRYSSSWDGPGYWGQGTLVTVSSGSTSGSGKPGSGEGSTKGQSALTQPASVSGSPGQSITISCTGTSSDVGGYNYVSWYQQHPGKAPKLMIYDVSNRPSGVSNRFSGSKSGNTASLTISGLQAEDEADYYCSSYTSSSTRVFGTGTKLTVLEQKLISEEDLNPGGGGGSGGGGSGGGGSGGGGSGSMDIQMTQSPSSLSASVGDRVTITCRASQDIRNYLNWYQQKPGKAPKLLIYYTSRLESGVPSRFSGSGSGTDYTLTISSLQPEDFATYYCQQGNTLPWTFGQGTKVEIKGGGGSGGGGSGGGGSEVQLVESGGGLVQPGGSLRLSCAASGYSFTGYTMNWVRQAPGKGLEWVALINPTKGVSTYNQKFKDRFTISVDKSKNTAYLQMNSLRAEDTAVYYCARSGYYGDSDWYFDVWGQGTLVTVSSTSGGGGSLESGQVLLESNIKVLPTWSTPVQPMALIVLGGVAGLLLFIGLGIFFCVRCRHRRRQAERMSQIKRLLSEKKTCQCPHRFQKTCSPI

SEQ ID NO: 470 - protein, 644 aa, Artificial Sequence
  Description of Artificial Sequence: Synthetic polypeptide
MALPVTALLLPLALLLHAARPQVQLVQSGAEVKKPGSSVKVSCKASGGTFSSYAISWVRQAPGQGLEWMGGIIPIFGTANYAQKFQGRVTITADESTSTAYMELSSLRSEDTAVYYCARDILRLSVSSGMDVWGQGTLVTVSSGSTSGSGKPGSGEGSTKGSYVLTQPPSASGTPGQRVTISCSGSSSNIGGNYVYWYQQLPGTAPKLLIYRNNQRPSGVPDRFSGSKSGTSASLAISGLRSEDEADYYCAAWDDSLSGWVFGGGTKLTVLEQKLISEEDLNPGGGGGSGGGGSGGGGSGGGGSGSMDIQMTQSPSSLSASVGDRVTITCRASQDIRNYLNWYQQKPGKAPKLLIYYTSRLESGVPSRFSGSGSGTDYTLTISSLQPEDFATYYCQQGNTLPWTFGQGTKVEIKGGGGSGGGGSGGGGSEVQLVESGGGLVQPGGSLRLSCAASGYSFTGYTMNWVRQAPGKGLEWVALINPTKGVSTYNQKFKDRFTISVDKSKNTAYLQMNSLRAEDTAVYYCARSGYYGDSDWYFDVWGQGTLVTVSSTSGGGGSLESGQVLLESNIKVLPTWSTPVQPMALIVLGGVAGLLLFIGLGIFFCVRCRHRRRQAERMSQIKRLLSEKKTCQCPHRFQKTCSPI

SEQ ID NO: 471 - protein, 646 aa, Artificial Sequence
  Description of Artificial Sequence: Synthetic polypeptide
MALPVTALLLPLALLLHAARPQVQLVQSGAEVKKPGSSVKVSCKASGGTFSSYAISWVRQAPGQGLEWMGGIIPIFGTANYAQKFQGRVTITADKSTSTAYMELSSLRSEDTAVYYCARDGGRYSYGRSFDYWGQGTLVTVSSGSTSGSGKPGSGEGSTKGQSVLTQPPSVSGAPGQRVTISCTGSSSNIGAGYDVHWYQQLPGTAPKLLIYGNSNRPSGVPDRFSGSKSGTSASLAITGLQAEDEADYYCQSYDSSLSGPVVFGGGTKLTVLEQKLISEEDLNPGGGGGSGGGGSGGGGSGGGGSGSMDIQMTQSPSSLSASVGDRVTITCRASQDIRNYLNWYQQKPGKAPKLLIYYTSRLESGVPSRFSGSGSGTDYTLTISSLQPEDFATYYCQQGNTLPWTFGQGTKVEIKGGGGSGGGGSGGGGSEVQLVESGGGLVQPGGSLRLSCAASGYSFTGYTMNWVRQAPGKGLEWVALINPTKGVSTYNQKFKDRFTISVDKSKNTAYLQMNSLRAEDTAVYYCARSGYYGDSDWYFDVWGQGTLVTVSSTSGGGGSLESGQVLLESNIKVLPTWSTPVQPMALIVLGGVAGLLLFIGLGIFFCVRCRHRRRQAERMSQIKRLLSEKKTCQCPHRFQKTCSPI

SEQ ID NO: 472 - protein, 643 aa, Artificial Sequence
  Description of Artificial Sequence: Synthetic polypeptide
MALPVTALLLPLALLLHAARPQVQLVQSGAEVKKPGSSVKVSCKASGGTFSSYAISWVRQAPGQGLEWMGGIIPIFGTANYAQKFQGRVTITADESTSTAYMELSSLRSEDTAVYYCARPLRPLHYYGMDVWGQGTLVTVSSGSTSGSGKPGSGEGSTKGQSVLTQPPSASGTPGQRVTISCSGSSSNIGSNYVYWYQQLPGTAPKLLIYRNNQRPSGVPDRFSGSKSGTSASLAISGLRSEDEADYYCAAWDDSLTEGVFGGGTKLTVLEQKLISEEDLNPGGGGGSGGGGSGGGGSGGGGSGSMDIQMTQSPSSLSASVGDRVTITCRASQDIRNYLNWYQQKPGKAPKLLIYYTSRLESGVPSRFSGSGSGTDYTLTISSLQPEDFATYYCQQGNTLPWTFGQGTKVEIKGGGGSGGGGSGGGGSEVQLVESGGGLVQPGGSLRLSCAASGYSFTGYTMNWVRQAPGKGLEWVALINPTKGVSTYNQKFKDRFTISVDKSKNTAYLQMNSLRAEDTAVYYCARSGYYGDSDWYFDVWGQGTLVTVSSTSGGGGSLESGQVLLESNIKVLPTWSTPVQPMALIVLGGVAGLLLFIGLGIFFCVRCRHRRRQAERMSQIKRLLSEKKTCQCPHRFQKTCSPI

SEQ ID NO: 473 - protein, 644 aa, Artificial Sequence
  Description of Artificial Sequence: Synthetic polypeptide
MALPVTALLLPLALLLHAARPQVQLVESGGGVVQPGRSLRLSCAASGFTFSSYGMHWVRRAPGKGLEWVAVISYDGSNKYYADSVKGRFTISRDNSKNTLYLQMNSLRAEDTAVYYCAKDGGDSGSLDYWGQGTLVTVSSGSTSGSGKPGSGEGSTKGDIVMTQSPDSLAVSLGERATINCKSSQSVLYSSNNKNYLAWYQQKPGQPPKLLIYWASTRESGVPDRFSGSGSGTDFTLTISSLQAEDVAVYYCQQYYSTPLTFGGGTKLEIKEQKLISEEDLNPGGGGGSGGGGSGGGGSGGGGSGSMDIQMTQSPSSLSASVGDRVTITCRASQDIRNYLNWYQQKPGKAPKLLIYYTSRLESGVPSRFSGSGSGTDYTLTISSLQPEDFATYYCQQGNTLPWTFGQGTKVEIKGGGGSGGGGSGGGGSEVQLVESGGGLVQPGGSLRLSCAASGYSFTGYTMNWVRQAPGKGLEWVALINPTKGVSTYNQKFKDRFTISVDKSKNTAYLQMNSLRAEDTAVYYCARSGYYGDSDWYFDVWGQGTLVTVSSTSGGGGSLESGQVLLESNIKVLPTWSTPVQPMALIVLGGVAGLLLFIGLGIFFCVRCRHRRRQAERMSQIKRLLSEKKTCQCPHRFQKTCSPI

SEQ ID NO: 474 - protein, 639 aa, Artificial Sequence
  Description of Artificial Sequence: Synthetic polypeptide
MALPVTALLLPLALLLHAARPEVQLLESGGGLVQPGGSLRLSCAASGFTFSSYWMSWVRQAPGKGLEWVANIKQDGSEKYYVDSVKGRFTISRDNAKNSLYLQMNSLRAEDTAVYYCARPAGQLLYGMDVWGQGTLVTVSSGSTSGSGKPGSGEGSTKGSYVLTQPPSVSVSPGQTARITCSGDALPKQYAYWYQQKPGQAPVLVIYKDSERPSGIPERFSGSSSGTTVTLTISGVQAEDEADYYCQSADSSGTWVFGGGTKLTVLEQKLISEEDLNPGGGGGSGGGGSGGGGSGGGGSGSMDIQMTQSPSSLSASVGDRVTITCRASQDIRNYLNWYQQKPGKAPKLLIYYTSRLESGVPSRFSGSGSGTDYTLTISSLQPEDFATYYCQQGNTLPWTFGQGTKVEIKGGGGSGGGGSGGGGSEVQLVESGGGLVQPGGSLRLSCAASGYSFTGYTMNWVRQAPGKGLEWVALINPTKGVSTYNQKFKDRFTISVDKSKNTAYLQMNSLRAEDTAVYYCARSGYYGDSDWYFDVWGQGTLVTVSSTSGGGGSLESGQVLLESNIKVLPTWSTPVQPMALIVLGGVAGLLLFIGLGIFFCVRCRHRRRQAERMSQIKRLLSEKKTCQCPHRFQKTCSPI

SEQ ID NO: 475 - protein, 644 aa, Artificial Sequence
  Description of Artificial Sequence: Synthetic polypeptide
MALPVTALLLPLALLLHAARPEVQLLESGGGVVQPGRSLRLSCAASGFTFSSYGMHWVRQAPGKGLEWVAVISYDGSNKYYADSVKGRFTISRDNSKNTLYLQMNSLRAEDTAVYYCAKDAADMGAFDYWGQGTLVTVSSGSTSGSGKPGSGEGSTKGDIQMTQSPDSLAVSLGERATMNCKSSQSVLYSSNNKNYLAWYQQKPGQPPKLLIYWASARESGVPDRFSGSGSGTDFTLTISSLQAEDVAVYYCQQYYSTPLTFGQGTKVEIKEQKLISEEDLNPGGGGGSGGGGSGGGGSGGGGSGSMDIQMTQSPSSLSASVGDRVTITCRASQDIRNYLNWYQQKPGKAPKLLIYYTSRLESGVPSRFSGSGSGTDYTLTISSLQPEDFATYYCQQGNTLPWTFGQGTKVEIKGGGGSGGGGSGGGGSEVQLVESGGGLVQPGGSLRLSCAASGYSFTGYTMNWVRQAPGKGLEWVALINPTKGVSTYNQKFKDRFTISVDKSKNTAYLQMNSLRAEDTAVYYCARSGYYGDSDWYFDVWGQGTLVTVSSTSGGGGSLESGQVLLESNIKVLPTWSTPVQPMALIVLGGVAGLLLFIGLGIFFCVRCRHRRRQAERMSQIKRLLSEKKTCQCPHRFQKTCSPI

SEQ ID NO: 476 - protein, 644 aa, Artificial Sequence
  Description of Artificial Sequence: Synthetic polypeptide
MALPVTALLLPLALLLHAARPEVQLLESGGGLVKPGGSLRLSCAASGFTFSSYSMNWVRQAPGKGLEWVSAISGSGGSTYYADSVKGRFTISRDNSKNTLYLQMNSLRAEDTAVYYCARARGYSYGSDAFDIWGQGTMVTVSSGSTSGSGKPGSGEGSTKGQSVLTQPPSASGTPGQRVTISCSGSSSNIGSNYVYWYQQLPGTAPKLLIYRNNQRPSGVPDRFSGSKSGTSASLAISGLRSEDEADYYCAAWDDSLSGVVFGGGTKLTVLEQKLISEEDLNPGGGGGSGGGGSGGGGSGGGGSGSMDIQMTQSPSSLSASVGDRVTITCRASQDIRNYLNWYQQKPGKAPKLLIYYTSRLESGVPSRFSGSGSGTDYTLTISSLQPEDFATYYCQQGNTLPWTFGQGTKVEIKGGGGSGGGGSGGGGSEVQLVESGGGLVQPGGSLRLSCAASGYSFTGYTMNWVRQAPGKGLEWVALINPTKGVSTYNQKFKDRFTISVDKSKNTAYLQMNSLRAEDTAVYYCARSGYYGDSDWYFDVWGQGTLVTVSSTSGGGGSLESGQVLLESNIKVLPTWSTPVQPMALIVLGGVAGLLLFIGLGIFFCVRCRHRRRQAERMSQIKRLLSEKKTCQCPHRFQKTCSPI

SEQ ID NO: 477 - protein, 645 aa, Artificial Sequence
  Description of Artificial Sequence: Synthetic polypeptide
MALPVTALLLPLALLLHAARPQVQLVQSGGGVVQPGRSLRLSCAASGFTFSSYGMHWVRQAPGKGLEWVAVISYDGSNKYYADSVKGRFTISRDNSKNTLYLQMNSLRAEDTAVYYCAKGVPRYYYYYGMDVWGQGTMVTVSSGSTSGSGKPGSGEGSTKGQSVLTQPPSVSGAPGQRVTISCTGSSSNIGAGYDVHWYQQLPGTAPKLLIYGNSNRPSGVPDRFSGSKSGTSASLAITGLQAEDEADYYCQSYDSSLSGSVFGGGTKLTVLEQKLISEEDLNPGGGGGSGGGGSGGGGSGGGGSGSMDIQMTQSPSSLSASVGDRVTITCRASQDIRNYLNWYQQKPGKAPKLLIYYTSRLESGVPSRFSGSGSGTDYTLTISSLQPEDFATYYCQQGNTLPWTFGQGTKVEIKGGGGSGGGGSGGGGSEVQLVESGGGLVQPGGSLRLSCAASGYSFTGYTMNWVRQAPGKGLEWVALINPTKGVSTYNQKFKDRFTISVDKSKNTAYLQMNSLRAEDTAVYYCARSGYYGDSDWYFDVWGQGTLVTVSSTSGGGGSLESGQVLLESNIKVLPTWSTPVQPMALIVLGGVAGLLLFIGLGIFFCVRCRHRRRQAERMSQIKRLLSEKKTCQCPHRFQKTCSPI

SEQ ID NO: 478 - protein, 648 aa, Artificial Sequence
  Description of Artificial Sequence: Synthetic polypeptide
MALPVTALLLPLALLLHAARPEVQLVQSGAEVKKPGSSVKVSCKASGGTFSSYAISWVRQAPGQGLEWMGGIIPIFGTANYAQKFQGRVTITADESTSTAYMELSSLRSEDTAVYYCARDRGRRYCSGGSCPNAFDIWGQGTMVTVSSGSTSGSGKPGSGEGSTKGEIVLTQSPATLSVSPGERATLSCRASQSVSSNLAWYQQKPGQAPRLLIYGASTRATGIPARFSGSGSGTEFTLTISSLQSEDFAVYYCQQYNNWPPALTFGGGTKVEIKEQKLISEEDLNPGGGGGSGGGGSGGGGSGGGGSGSMDIQMTQSPSSLSASVGDRVTITCRASQDIRNYLNWYQQKPGKAPKLLIYYTSRLESGVPSRFSGSGSGTDYTLTISSLQPEDFATYYCQQGNTLPWTFGQGTKVEIKGGGGSGGGGSGGGGSEVQLVESGGGLVQPGGSLRLSCAASGYSFTGYTMNWVRQAPGKGLEWVALINPTKGVSTYNQKFKDRFTISVDKSKNTAYLQMNSLRAEDTAVYYCARSGYYGDSDWYFDVWGQGTLVTVSSTSGGGGSLESGQVLLESNIKVLPTWSTPVQPMALIVLGGVAGLLLFIGLGIFFCVRCRHRRRQAERMSQIKRLLSEKKTCQCPHRFQKTCSPI

SEQ ID NO: 479 - protein, 648 aa, Artificial Sequence
  Description of Artificial Sequence: Synthetic polypeptide
MALPVTALLLPLALLLHAARPQVQLVQSGAEVKKPGSSVKVSCKASGGTFSSYAISWVRQAPGQGLEWMGGIIPIFGTANYAQKFQGRVTITADESTSTAYMELSSLRSEDTAVYYCARGGYVWGSYRQNSNWFDPWGQGTLVTVSSGSTSGSGKPGSGEGSTKGSYVLTQPPSASGTPGQRVTISCSGSSSNIGSNYVYWYQQLPGTAPKLLIYRNNQRPSGVPDRFSGSKSGTSASLAISGLRSEDEADYYCAAWDDSLSGWVFGGGTKLTVLEQKLISEEDLNPGGGGGSGGGGSGGGGSGGGGSGSMDIQMTQSPSSLSASVGDRVTITCRASQDIRNYLNWYQQKPGKAPKLLIYYTSRLESGVPSRFSGSGSGTDYTLTISSLQPEDFATYYCQQGNTLPWTFGQGTKVEIKGGGGSGGGGSGGGGSEVQLVESGGGLVQPGGSLRLSCAASGYSFTGYTMNWVRQAPGKGLEWVALINPTKGVSTYNQKFKDRFTISVDKSKNTAYLQMNSLRAEDTAVYYCARSGYYGDSDWYFDVWGQGTLVTVSSTSGGGGSLESGQVLLESNIKVLPTWSTPVQPMALIVLGGVAGLLLFIGLGIFFCVRCRHRRRQAERMSQIKRLLSEKKTCQCPHRFQKTCSPI

SEQ ID NO: 480 - protein, 644 aa, Artificial Sequence
  Description of Artificial Sequence: Synthetic polypeptide
MALPVTALLLPLALLLHAARPQVQLVESGAEVKKPGSSVKVSCKASGGTFSSYAISWVRQAPGQGLEWMGGIIPIFGTANYAQKFQGRVTITADESTSTAYMELSSLRSEDTAVYYCARDILRLSVSSGMDVWGQGTLVTVSSGSTSGSGKPGSGEGSTKGQSVLTQPPSASGTPGRRVTISCSGSSSNIGSNYVYWYQQLPGTAPKLLIYRNNQRPSGVPDRFSGSKSGTSASLAISGLRSEDEADYYCAAWDDSLSGVVFGGGTKLTVLEQKLISEEDLNPGGGGGSGGGGSGGGGSGGGGSGSMDIQMTQSPSSLSASVGDRVTITCRASQDIRNYLNWYQQKPGKAPKLLIYYTSRLESGVPSRFSGSGSGTDYTLTISSLQPEDFATYYCQQGNTLPWTFGQGTKVEIKGGGGSGGGGSGGGGSEVQLVESGGGLVQPGGSLRLSCAASGYSFTGYTMNWVRQAPGKGLEWVALINPTKGVSTYNQKFKDRFTISVDKSKNTAYLQMNSLRAEDTAVYYCARSGYYGDSDWYFDVWGQGTLVTVSSTSGGGGSLESGQVLLESNIKVLPTWSTPVQPMALIVLGGVAGLLLFIGLGIFFCVRCRHRRRQAERMSQIKRLLSEKKTCQCPHRFQKTCSPI

SEQ ID NO: 481 - protein, 640 aa, Artificial Sequence
  Description of Artificial Sequence: Synthetic polypeptide
MALPVTALLLPLALLLHAARPQVQLVESGGGLVQPGGSLRLSCAASGFTFSSYWMSWVRQAPGKGLEWVANIKQDGSEKYYVDSVKGRFTISRDNAKNSLYLQMNSLRAEDTAVYYCARWSHYYDSSGLDYWGQGTLVTVSSGSTSGSGKPGSGEGSTKGSYVLTQPPSVSVSPGQTARITCSGDALPKQYAYWYQQKPGQAPVLVIYKDSERPSGIPERFSGSSSGTTVTLTISGVQAEDEADYYCQSADSSGTWVFGGGTKLTVLEQKLISEEDLNPGGGGGSGGGGSGGGGSGGGGSGSMDIQMTQSPSSLSASVGDRVTITCRASQDIRNYLNWYQQKPGKAPKLLIYYTSRLESGVPSRFSGSGSGTDYTLTISSLQPEDFATYYCQQGNTLPWTFGQGTKVEIKGGGGSGGGGSGGGGSEVQLVESGGGLVQPGGSLRLSCAASGYSFTGYTMNWVRQAPGKGLEWVALINPTKGVSTYNQKFKDRFTISVDKSKNTAYLQMNSLRAEDTAVYYCARSGYYGDSDWYFDVWGQGTLVTVSSTSGGGGSLESGQVLLESNIKVLPTWSTPVQPMALIVLGGVAGLLLFIGLGIFFCVRCRHRRRQAERMSQIKRLLSEKKTCQCPHRFQKTCSPI

SEQ ID NO: 482 - protein, 647 aa, Artificial Sequence
  Description of Artificial Sequence: Synthetic polypeptide
MALPVTALLLPLALLLHAARPQVQLVESGAEVKKPGSSVKVSCKASGGTFSSYAISWVRQAPGQGLEWMGGIIPIFGTANYAQKFQGRVTITADKSTSTAYMELSSLRSEDTAVYYCARTHLPYSYGLGGFDYWGQGTLVTVSSGSTSGSGKPGSGEGSTKGQSVLTQPPSVSGAPGQRVTISCTGSSSNIGAGYDVHWYQQLPGTAPKLLIYGNSNRPSGVPDRFSGSKSGTSASLAITGLQAEDEADYYCQSYDSSLSGPVVFGGGTKVTVLEQKLISEEDLNPGGGGGSGGGGSGGGGSGGGGSGSMDIQMTQSPSSLSASVGDRVTITCRASQDIRNYLNWYQQKPGKAPKLLIYYTSRLESGVPSRFSGSGSGTDYTLTISSLQPEDFATYYCQQGNTLPWTFGQGTKVEIKGGGGSGGGGSGGGGSEVQLVESGGGLVQPGGSLRLSCAASGYSFTGYTMNWVRQAPGKGLEWVALINPTKGVSTYNQKFKDRFTISVDKSKNTAYLQMNSLRAEDTAVYYCARSGYYGDSDWYFDVWGQGTLVTVSSTSGGGGSLESGQVLLESNIKVLPTWSTPVQPMALIVLGGVAGLLLFIGLGIFFCVRCRHRRRQAERMSQIKRLLSEKKTCQCPHRFQKTCSPI

SEQ ID NO: 483 - protein, 649 aa, Artificial Sequence
  Description of Artificial Sequence: Synthetic polypeptide
MALPVTALLLPLALLLHAARPEVQLVQSGAEVKKPGSSVKVSCKASGGTFSSYAISWVRQAPGQGLEWMGGIIPIFGTANYAQKFQGRVTITADESTSTAYMELSSLRSEDTAVYYCARDPSRDYYGSGRFSWFDPWGQGTLVTVSSGSTSGSGKPGSGEGSTKGQSVLTQPPSASGTPGQRVTISCSGSSSNIGSNYVYWYQQLPGTAPKLLIYRNNQRPSGVPDRFSGSKSGTSASLAISGLRSEDEADYYCAAWDDSLSGRGVFGGGTKLTVLEQKLISEEDLNPGGGGGSGGGGSGGGGSGGGGSGSMDIQMTQSPSSLSASVGDRVTITCRASQDIRNYLNWYQQKPGKAPKLLIYYTSRLESGVPSRFSGSGSGTDYTLTISSLQPEDFATYYCQQGNTLPWTFGQGTKVEIKGGGGSGGGGSGGGGSEVQLVESGGGLVQPGGSLRLSCAASGYSFTGYTMNWVRQAPGKGLEWVALINPTKGVSTYNQKFKDRFTISVDKSKNTAYLQMNSLRAEDTAVYYCARSGYYGDSDWYFDVWGQGTLVTVSSTSGGGGSLESGQVLLESNIKVLPTWSTPVQPMALIVLGGVAGLLLFIGLGIFFCVRCRHRRRQAERMSQIKRLLSEKKTCQCPHRFQKTCSPI

SEQ ID NO: 484 - protein, 649 aa, Artificial Sequence
  Description of Artificial Sequence: Synthetic polypeptide
MALPVTALLLPLALLLHAARPQVQLVQSGAEVKKPGASVKVSCKASGYTFTSYGISWVRQAPGQGLEWMGWISAYNGNTNYAQKLQGRVTMTTDTSTSTAYMELRSLRSDDTAVYYCARDIIRYCSSTSCYRGIDYWGQGTLVTVSSGSTSGSGKPGSGEGSTKGQSALTQPASVSGSPGQSITISCTGTSSDVGGYNYVSWYQQHPGKAPKLMIYDVSNRPSGVSNRFSGSKSGNTASLTISGLQAEDEADYYCSSYTSSSPHVVSGGGTKLTVLEQKLISEEDLNPGGGGGSGGGGSGGGGSGGGGSGSMDIQMTQSPSSLSASVGDRVTITCRASQDIRNYLNWYQQKPGKAPKLLIYYTSRLESGVPSRFSGSGSGTDYTLTISSLQPEDFATYYCQQGNTLPWTFGQGTKVEIKGGGGSGGGGSGGGGSEVQLVESGGGLVQPGGSLRLSCAASGYSFTGYTMNWVRQAPGKGLEWVALINPTKGVSTYNQKFKDRFTISVDKSKNTAYLQMNSLRAEDTAVYYCARSGYYGDSDWYFDVWGQGTLVTVSSTSGGGGSLESGQVLLESNIKVLPTWSTPVQPMALIVLGGVAGLLLFIGLGIFFCVRCRHRRRQAERMSQIKRLLSEKKTCQCPHRFQKTCSPI

SEQ ID NO: 485 - protein, 645 aa, Artificial Sequence
  Description of Artificial Sequence: Synthetic polypeptide
MALPVTALLLPLALLLHAARPQVQLVESGGGVVQPGRSLRLSCAASGFTFSSYGMHWVRQAPGKGLEWVAVISYDGSNKYYADSVKGRFTISRDNSKNTLYLQMNSLRAEDTAVYYCARDGTDYRGAFDIWGQGTMVTVSSGSTSGSGKPGSGEGSTKGDIQLTQSPDSLAVPLGERATINCKSSQSVLYSSNNKNYLAWYQQKPGQPPKLLIYWASTRESGVPDRFSGSGSGTDFTLTISSLQAEDVAVYYCQQYYSTPLTFGQGTKLEIKEQKLISEEDLNPGGGGGSGGGGSGGGGSGGGGSGSMDIQMTQSPSSLSASVGDRVTITCRASQDIRNYLNWYQQKPGKAPKLLIYYTSRLESGVPSRFSGSGSGTDYTLTISSLQPEDFATYYCQQGNTLPWTFGQGTKVEIKGGGGSGGGGSGGGGSEVQLVESGGGLVQPGGSLRLSCAASGYSFTGYTMNWVRQAPGKGLEWVALINPTKGVSTYNQKFKDRFTISVDKSKNTAYLQMNSLRAEDTAVYYCARSGYYGDSDWYFDVWGQGTLVTVSSTSGGGGSLESGQVLLESNIKVLPTWSTPVQPMALIVLGGVAGLLLFIGLGIFFCVRCRHRRRQAERMSQIKRLLSEKKTCQCPHRFQKTCSPI

SEQ ID NO: 486 - protein, 645 aa, Artificial Sequence
  Description of Artificial Sequence: Synthetic polypeptide
MALPVTALLLPLALLLHAARPEVQLVQSGAEVKKPGSSVRVSCKASGGTFSSYAISWVRQAPGQGLEWMGGIIPIFGTANYAQKFQGRVTITADKSTSTAYMELSSLRSEDTAVYYCARGGGRWLHSRLDVWGQGTTVTVSSGSTSGSGKPGSGEGSTKGQSVLTQPPSVSGAPGQRVTISCTGSSSNIGAGYDVHWYQQFPGTAPKLLIFGNNNRPSGVPDRFSGSKSGTSASLAITGLQAEDEANYYCQSYDRSLSGPVVFGGGTKLTVLEQKLISEEDLNPGGGGGSGGGGSGGGGSGGGGSGSMDIQMTQSPSSLSASVGDRVTITCRASQDIRNYLNWYQQKPGKAPKLLIYYTSRLESGVPSRFSGSGSGTDYTLTISSLQPEDFATYYCQQGNTLPWTFGQGTKVEIKGGGGSGGGGSGGGGSEVQLVESGGGLVQPGGSLRLSCAASGYSFTGYTMNWVRQAPGKGLEWVALINPTKGVSTYNQKFKDRFTISVDKSKNTAYLQMNSLRAEDTAVYYCARSGYYGDSDWYFDVWGQGTLVTVSSTSGGGGSLESGQVLLESNIKVLPTWSTPVQPMALIVLGGVAGLLLFIGLGIFFCVRCRHRRRQAERMSQIKRLLSEKKTCQCPHRFQKTCSPI

SEQ ID NO: 487 - protein, 644 aa, Artificial Sequence
  Description of Artificial Sequence: Synthetic polypeptide
MALPVTALLLPLALLLHAARPEVQLVESGGGVVQPGRSLRLSCAASGFTFSSYGMHWVRQAPGKGLEWVAVISYDGSNKYYADSVKGRFTISRDNSKNTLYLQMNSLRAEDTAVYYCAKDAGDLGAFDIWGQGTMVTVSSGSTSGSGKPGSGEGSTKGDIVMTQSPDSLAVSLGERATINCKSSQSVLYSSNNKNYLAWYQQKPGQPPKLLIYWASTRESGVPDRFSGSGSGTDFTLTISSLQAEDVAVYYCQQYYSTPLTFGPGTKVEIKEQKLISEEDLNPGGGGGSGGGGSGGGGSGGGGSGSMDIQMTQSPSSLSASVGDRVTITCRASQDIRNYLNWYQQKPGKAPKLLIYYTSRLESGVPSRFSGSGSGTDYTLTISSLQPEDFATYYCQQGNTLPWTFGQGTKVEIKGGGGSGGGGSGGGGSEVQLVESGGGLVQPGGSLRLSCAASGYSFTGYTMNWVRQAPGKGLEWVALINPTKGVSTYNQKFKDRFTISVDKSKNTAYLQMNSLRAEDTAVYYCARSGYYGDSDWYFDVWGQGTLVTVSSTSGGGGSLESGQVLLESNIKVLPTWSTPVQPMALIVLGGVAGLLLFIGLGIFFCVRCRHRRRQAERMSQIKRLLSEKKTCQCPHRFQKTCSPI

SEQ ID NO: 488 - protein, 646 aa, Artificial Sequence
  Description of Artificial Sequence: Synthetic polypeptide
MALPVTALLLPLALLLHAARPQVQLVQSGGGVVQPGRSLRLSCAASGFTFSSYAMHWVRQAPGKGLEWVAVISYDGSNKYYADSVKGRFTISRDNSKNTLYLQMNSLRAEDTAVYYCARGRVYYYDSSGYSYWGQGTLVTVSSGSTSGSGKPGSGEGSTKGQSVLTQPPSVSGAPGQRVTISCTGSSSNIGAGYDVHWYQQLPGTAPKLLIYGNSNRPSGVPDRFSGSKSGTSASLAITGLQAEDEADYYCQSYDSSLSGREVFGTGTKLTVLEQKLISEEDLNPGGGGGSGGGGSGGGGSGGGGSGSMDIQMTQSPSSLSASVGDRVTITCRASQDIRNYLNWYQQKPGKAPKLLIYYTSRLESGVPSRFSGSGSGTDYTLTISSLQPEDFATYYCQQGNTLPWTFGQGTKVEIKGGGGSGGGGSGGGGSEVQLVESGGGLVQPGGSLRLSCAASGYSFTGYTMNWVRQAPGKGLEWVALINPTKGVSTYNQKFKDRFTISVDKSKNTAYLQMNSLRAEDTAVYYCARSGYYGDSDWYFDVWGQGTLVTVSSTSGGGGSLESGQVLLESNIKVLPTWSTPVQPMALIVLGGVAGLLLFIGLGIFFCVRCRHRRRQAERMSQIKRLLSEKKTCQCPHRFQKTCSPI

SEQ ID NO: 489 - protein, 644 aa, Artificial Sequence
  Description of Artificial Sequence: Synthetic polypeptide
MALPVTALLLPLALLLHAARPQVQLVESGAEVKKPGSSVKVSCKASGGTFSSYAISWVRQAPGQGLEWMGGIIPIFGTANYAQKFQGRVTITADESTSTAYMELSSLRSEDTAVYYCARPLYAPRFGYGMDVWGQGTLVTVSSGSTSGSGKPGSGEGSTKGQSVLTQPPSASGTPGQRVTISCSGSSSNIGSNYVYWYQQLPGTAPKLLIYRNNQRPSGVPDRFSGSKSGTSASLAISGLRSEDEADYYCAAWDDSLSGWVFGGGTQLTVLEQKLISEEDLNPGGGGGSGGGGSGGGGSGGGGSGSMDIQMTQSPSSLSASVGDRVTITCRASQDIRNYLNWYQQKPGKAPKLLIYYTSRLESGVPSRFSGSGSGTDYTLTISSLQPEDFATYYCQQGNTLPWTFGQGTKVEIKGGGGSGGGGSGGGGSEVQLVESGGGLVQPGGSLRLSCAASGYSFTGYTMNWVRQAPGKGLEWVALINPTKGVSTYNQKFKDRFTISVDKSKNTAYLQMNSLRAEDTAVYYCARSGYYGDSDWYFDVWGQGTLVTVSSTSGGGGSLESGQVLLESNIKVLPTWSTPVQPMALIVLGGVAGLLLFIGLGIFFCVRCRHRRRQAERMSQIKRLLSEKKTCQCPHRFQKTCSPI

SEQ ID NO: 490 - protein, 641 aa, Artificial Sequence
  Description of Artificial Sequence: Synthetic polypeptide
MALPVTALLLPLALLLHAARPEVQLLESGGGLVQPGGSLRLSCAASGFTFSSYAMSWVRQAPGKGLEWVSAISGSGGSTYYADSVKGRFTISRDNSKNTLYLQMNSLRAEDTAVYYCAKDRGGQRGFDYWGQGTLVTVSSGSTSGSGKPGSGEGSTKGQSVLTQPPSASGTPGQRVTISCSGSSSNIGSNYVYWYQQLPGTAPKLLIYRNNQRPSGVPDRFSGSKSGTSASLAISGLRSEDEADYYCAAWDDSLSGLVFGGGTKLTVLEQKLISEEDLNPGGGGGSGGGGSGGGGSGGGGSGSMDIQMTQSPSSLSASVGDRVTITCRASQDIRNYLNWYQQKPGKAPKLLIYYTSRLESGVPSRFSGSGSGTDYTLTISSLQPEDFATYYCQQGNTLPWTFGQGTKVEIKGGGGSGGGGSGGGGSEVQLVESGGGLVQPGGSLRLSCAASGYSFTGYTMNWVRQAPGKGLEWVALINPTKGVSTYNQKFKDRFTISVDKSKNTAYLQMNSLRAEDTAVYYCARSGYYGDSDWYFDVWGQGTLVTVSSTSGGGGSLESGQVLLESNIKVLPTWSTPVQPMALIVLGGVAGLLLFIGLGIFFCVRCRHRRRQAERMSQIKRLLSEKKTCQCPHRFQKTCSPI

SEQ ID NO: 491 - protein, 633 aa, Artificial Sequence
  Description of Artificial Sequence: Synthetic polypeptide
MALPVTALLLPLALLLHAARPEVKLVESGGGLVQPGGSLKLSCTTSGFTFSSYGLSWIRQTPDKRLELVASINRNGDNTYYTDSVKGRFTISRHDAKNTLNLQMNSLKSEDTAMYYCTRGGFSYWGQGTLVTVSAGSTSGSGKPGSGEGSTKGDIVLTQSPAIMSSSPGEKVTMTCSASSSVSYMYWYQQRPGSSPRLLIYDTSKLASGVPVRFSGSVSGTSYSLTISRMESEDAATYYCQQWSGFPPITFGAGTKLELKEQKLISEEDLNPGGGGGSGGGGSGGGGSGGGGSGSMDIQMTQSPSSLSASVGDRVTITCRASQDIRNYLNWYQQKPGKAPKLLIYYTSRLESGVPSRFSGSGSGTDYTLTISSLQPEDFATYYCQQGNTLPWTFGQGTKVEIKGGGGSGGGGSGGGGSEVQLVESGGGLVQPGGSLRLSCAASGYSFTGYTMNWVRQAPGKGLEWVALINPTKGVSTYNQKFKDRFTISVDKSKNTAYLQMNSLRAEDTAVYYCARSGYYGDSDWYFDVWGQGTLVTVSSTSGGGGSLESGQVLLESNIKVLPTWSTPVQPMALIVLGGVAGLLLFIGLGIFFCVRCRHRRRQAERMSQIKRLLSEKKTCQCPHRFQKTCSPI

SEQ ID NO: 492 - protein, 633 aa, Artificial Sequence
  Description of Artificial Sequence: Synthetic polypeptide
MALPVTALLLPLALLLHAARPEVKLVESGGGLVQPGGSLKLSCTTSGFTFSSYGLSWIRQTPDKRLELVASINRNGDNTYYTDSVRGRFTISRDNAKNTLNLQMSSLKSEDTAMYYCTRGGFSYWGQGTLVTVSAGSTSGSGKPGSGEGSTKGDIVLTQSPATMSASPGEKVTLTCSASPGVTYMYWYQQKPGSSPRLLIYDTSNLASGVPLRFSGSGSGTSYSLTISRTEAEDAATYYCQQWSGYPPITFGAGTKLELREQKLISEEDLNPGGGGGSGGGGSGGGGSGGGGSGSMDIQMTQSPSSLSASVGDRVTITCRASQDIRNYLNWYQQKPGKAPKLLIYYTSRLESGVPSRFSGSGSGTDYTLTISSLQPEDFATYYCQQGNTLPWTFGQGTKVEIKGGGGSGGGGSGGGGSEVQLVESGGGLVQPGGSLRLSCAASGYSFTGYTMNWVRQAPGKGLEWVALINPTKGVSTYNQKFKDRFTISVDKSKNTAYLQMNSLRAEDTAVYYCARSGYYGDSDWYFDVWGQGTLVTVSSTSGGGGSLESGQVLLESNIKVLPTWSTPVQPMALIVLGGVAGLLLFIGLGIFFCVRCRHRRRQAERMSQIKRLLSEKKTCQCPHRFQKTCSPI

SEQ ID NO: 493 - protein, 633 aa, Artificial Sequence
  Description of Artificial Sequence: Synthetic polypeptide
MALPVTALLLPLALLLHAARPEVKLVESGGGLVQPGGSLKLSCTTSGFTFSSYGLSWIRQTPDKRLELVASINRNGDNAYYIDSVKGRFTISRDNAKNALNLQMSSLKSEDTAMYYCTRGGFSHWGQGTLVTVAAGSTSGSGKPGSGEGSTKGQIVLTQSPAIMSASPGEKVTMTCSASSSVSYMYWYQQKPGSSPRLLIYDTSNLASGVPVRFSGSGSGTSYSLIISRMEAEDAATYYCQQWSGYPPITFGAGTKLELKEQKLISEEDLNPGGGGGSGGGGSGGGGSGGGGSGSMDIQMTQSPSSLSASVGDRVTITCRASQDIRNYLNWYQQKPGKAPKLLIYYTSRLESGVPSRFSGSGSGTDYTLTISSLQPEDFATYYCQQGNTLPWTFGQGTKVEIKGGGGSGGGGSGGGGSEVQLVESGGGLVQPGGSLRLSCAASGYSFTGYTMNWVRQAPGKGLEWVALINPTKGVSTYNQKFKDRFTISVDKSKNTAYLQMNSLRAEDTAVYYCARSGYYGDSDWYFDVWGQGTLVTVSSTSGGGGSLESGQVLLESNIKVLPTWSTPVQPMALIVLGGVAGLLLFIGLGIFFCVRCRHRRRQAERMSQIKRLLSEKKTCQCPHRFQKTCSPI

SEQ ID NO: 494 - protein, 633 aa, Artificial Sequence
  Description of Artificial Sequence: Synthetic polypeptide
MALPVTALLLPLALLLHAARPEVKLVESGGGLVQPGGSLKLSCAASGFTFSSYGLSWVRQTPDKGLELVASINRNGGNTYYTDSVKGRFTISRDNAKNTLNLQMSSLKSEDTAMYYCARGGFTYWGQGTLVTVSAGSTSGSGKPGSGEGSTKGQIVLTQSPAIMSAFPGEKVTMTCSASSSVGYMYWYQQKPGSSPRLLIYDTSNLASGVPVRFSGSGSGTAYSLTISRMEAEDAATYYCQQWSGYPPITFGAGTKLELKEQKLISEEDLNPGGGGGSGGGGSGGGGSGGGGSGSMDIQMTQSPSSLSASVGDRVTITCRASQDIRNYLNWYQQKPGKAPKLLIYYTSRLESGVPSRFSGSGSGTDYTLTISSLQPEDFATYYCQQGNTLPWTFGQGTKVEIKGGGGSGGGGSGGGGSEVQLVESGGGLVQPGGSLRLSCAASGYSFTGYTMNWVRQAPGKGLEWVALINPTKGVSTYNQKFKDRFTISVDKSKNTAYLQMNSLRAEDTAVYYCARSGYYGDSDWYFDVWGQGTLVTVSSTSGGGGSLESGQVLLESNIKVLPTWSTPVQPMALIVLGGVAGLLLFIGLGIFFCVRCRHRRRQAERMSQIKRLLSEKKTCQCPHRFQKTCSPI

SEQ ID NO: 495 - protein, 633 aa, Artificial Sequence
  Description of Artificial Sequence: Synthetic polypeptide
MALPVTALLLPLALLLHAARPQVQLKESGGGLVRPGGSLKLSCAASGFTFSNYGMSWIRQTPDKNLELVASINTSGGNTYYPDSVKGRFTISRDNARATLNLQMSNLKSEDTAIYYCTRGGFTHWGQGTLVAVSAGSTSGSGKPGSGEGSTKGQIVLTQSPAIMSASPGEKVTMTCSASSSVSYMYWYQQKPGSSPRLLIYDTSNLASGVPVRFSGSGSGTSYFLTISRMEAEDAATYYCQQWTGYPPITFGAGTKLELREQKLISEEDLNPGGGGGSGGGGSGGGGSGGGGSGSMDIQMTQSPSSLSASVGDRVTITCRASQDIRNYLNWYQQKPGKAPKLLIYYTSRLESGVPSRFSGSGSGTDYTLTISSLQPEDFATYYCQQGNTLPWTFGQGTKVEIKGGGGSGGGGSGGGGSEVQLVESGGGLVQPGGSLRLSCAASGYSFTGYTMNWVRQAPGKGLEWVALINPTKGVSTYNQKFKDRFTISVDKSKNTAYLQMNSLRAEDTAVYYCARSGYYGDSDWYFDVWGQGTLVTVSSTSGGGGSLESGQVLLESNIKVLPTWSTPVQPMALIVLGGVAGLLLFIGLGIFFCVRCRHRRRQAERMSQIKRLLSEKKTCQCPHRFQKTCSPI

SEQ ID NO: 496 - protein, 633 aa, Artificial Sequence
  Description of Artificial Sequence: Synthetic polypeptide
MALPVTALLLPLALLLHAARPQVQLKESGGGLVQPGGSLKLSCAASGFPFSSYGLSWVRQTPDKRLELVATINRNGDSAYYPDSVKGRFTISRDDAKNTLYLQMSSLKSEDTAMYYCTRGGFAYWGQGTLVTVSAGSTSGSGKPGSGEGSTKGQIVLTQSPAIMSASPGEKVTMTCSGSSSVGYMYWYQQKPGFSPRLLIYDTSNLASGVPVRFSGSGSGTSYSLTISRMEAEDAATYYCQQWSGYPPITFGAGTKLELKEQKLISEEDLNPGGGGGSGGGGSGGGGSGGGGSGSMDIQMTQSPSSLSASVGDRVTITCRASQDIRNYLNWYQQKPGKAPKLLIYYTSRLESGVPSRFSGSGSGTDYTLTISSLQPEDFATYYCQQGNTLPWTFGQGTKVEIKGGGGSGGGGSGGGGSEVQLVESGGGLVQPGGSLRLSCAASGYSFTGYTMNWVRQAPGKGLEWVALINPTKGVSTYNQKFKDRFTISVDKSKNTAYLQMNSLRAEDTAVYYCARSGYYGDSDWYFDVWGQGTLVTVSSTSGGGGSLESGQVLLESNIKVLPTWSTPVQPMALIVLGGVAGLLLFIGLGIFFCVRCRHRRRQAERMSQIKRLLSEKKTCQCPHRFQKTCSPI

SEQ ID NO: 497 - protein, 633 aa, Artificial Sequence
  Description of Artificial Sequence: Synthetic polypeptide
MALPVTALLLPLALLLHAARPEVKLVESGGGLVRPGGSLKLSCAASGFTFSNYGMSWIRQTPDKNLELVASINTSGGNTYYPDSVKGRFTISRDNARATLNLQMSNLKSEDTAIYYCTRGGFTHWGQGTLVTVSAGSTSGSGKPGSGEGSTKGDIVLTQSPAIMSASPGEKVTMTCSASSSVAFMYWYQQKPGSSPRLLIYDTSKLASGVPVRFSGSGSGTSYSLTISRMEAEDAATYYCQQWSGYPPITFGAGTKLELKEQKLISEEDLNPGGGGGSGGGGSGGGGSGGGGSGSMDIQMTQSPSSLSASVGDRVTITCRASQDIRNYLNWYQQKPGKAPKLLIYYTSRLESGVPSRFSGSGSGTDYTLTISSLQPEDFATYYCQQGNTLPWTFGQGTKVEIKGGGGSGGGGSGGGGSEVQLVESGGGLVQPGGSLRLSCAASGYSFTGYTMNWVRQAPGKGLEWVALINPTKGVSTYNQKFKDRFTISVDKSKNTAYLQMNSLRAEDTAVYYCARSGYYGDSDWYFDVWGQGTLVTVSSTSGGGGSLESGQVLLESNIKVLPTWSTPVQPMALIVLGGVAGLLLFIGLGIFFCVRCRHRRRQAERMSQIKRLLSEKKTCQCPHRFQKTCSPI

SEQ ID NO: 498 - protein, 633 aa, Artificial Sequence
  Description of Artificial Sequence: Synthetic polypeptide
MALPVTALLLPLALLLHAARPQVQLKESGGGLVQPGGSLKLSCTTSGFTFSSYGLSWIRQTPDKRLELVASINRNGDNTYYTDSVRGRFTISRDNAKSTLNLQMSSLKSEDTAMYYCTRGGFSYWGQGTLVTVSAGSTSGSGKPGSGEGSTKGQIVLTQSPPLMSASPGEKVTMTCSASSSVGYMYWFQQRPGSSPRLLIYDTYNLASGVPVRFSGSGSGTSYSLTISRLEAEDAATYYCQQWSGYPPITFGAGTKLELREQKLISEEDLNPGGGGGSGGGGSGGGGSGGGGSGSMDIQMTQSPSSLSASVGDRVTITCRASQDIRNYLNWYQQKPGKAPKLLIYYTSRLESGVPSRFSGSGSGTDYTLTISSLQPEDFATYYCQQGNTLPWTFGQGTKVEIKGGGGSGGGGSGGGGSEVQLVESGGGLVQPGGSLRLSCAASGYSFTGYTMNWVRQAPGKGLEWVALINPTKGVSTYNQKFKDRFTISVDKSKNTAYLQMNSLRAEDTAVYYCARSGYYGDSDWYFDVWGQGTLVTVSSTSGGGGSLESGQVLLESNIKVLPTWSTPVQPMALIVLGGVAGLLLFIGLGIFFCVRCRHRRRQAERMSQIKRLLSEKKTCQCPHRFQKTCSPI

SEQ ID NO: 499 - protein, 633 aa, Artificial Sequence
  Description of Artificial Sequence: Synthetic polypeptide
MALPVTALLLPLALLLHAARPEVKLVESGGGLVQPGGSLKLSCAASGFTFSSYGLSWVRQTPDKRLELVASVNRNGGNTYYTDSVKGRFTISRDNAKNTLNLQMSSLKSEDTAMYYCARGGFTYWGQGTLVTVSAGSTSGSGKPGSGEGSTKGQIVLTQSPAIMSASPGEKVTMTCSASSSVGYMYWYQQKPGSSPRLLIYDTSHLASGVPVRFSGSGSGTSYSLTISRMEAEDAATYYCQQWSGYPPITFGAGTKLELKEQKLISEEDLNPGGGGGSGGGGSGGGGSGGGGSGSMDIQMTQSPSSLSASVGDRVTITCRASQDIRNYLNWYQQKPGKAPKLLIYYTSRLESGVPSRFSGSGSGTDYTLTISSLQPEDFATYYCQQGNTLPWTFGQGTKVEIKGGGGSGGGGSGGGGSEVQLVESGGGLVQPGGSLRLSCAASGYSFTGYTMNWVRQAPGKGLEWVALINPTKGVSTYNQKFKDRFTISVDKSKNTAYLQMNSLRAEDTAVYYCARSGYYGDSDWYFDVWGQGTLVTVSSTSGGGGSLESGQVLLESNIKVLPTWSTPVQPMALIVLGGVAGLLLFIGLGIFFCVRCRHRRRQAERMSQIKRLLSEKKTCQCPHRFQKTCSPI

SEQ ID NO: 500 - protein, 633 aa, Artificial Sequence
  Description of Artificial Sequence: Synthetic polypeptide
MALPVTALLLPLALLLHAARPEVKLVESGGGLVQPGGSLKLSCAASGFPFSSYGLSWVRQTPDKRLELVATINRNGDSAYYPDSVKGRFTISRDDAKNTLYLQMSSLKSEDTAMYYCTRGGFAYWGQGTLVTVSAGSTSGSGKPGSGEGSTKGQIVLTQSPVIMSASPGEKVTMTCSASSSVGYMYWYQQRPGSSPRLLIYDTSNLASGAPVRFSGSGSGTSYSLTISRMEAEDAATYYCQQWSGYPPITFGAGTKLELKEQKLISEEDLNPGGGGGSGGGGSGGGGSGGGGSGSMDIQMTQSPSSLSASVGDRVTITCRASQDIRNYLNWYQQKPGKAPKLLIYYTSRLESGVPSRFSGSGSGTDYTLTISSLQPEDFATYYCQQGNTLPWTFGQGTKVEIKGGGGSGGGGSGGGGSEVQLVESGGGLVQPGGSLRLSCAASGYSFTGYTMNWVRQAPGKGLEWVALINPTKGVSTYNQKFKDRFTISVDKSKNTAYLQMNSLRAEDTAVYYCARSGYYGDSDWYFDVWGQGTLVTVSSTSGGGGSLESGQVLLESNIKVLPTWSTPVQPMALIVLGGVAGLLLFIGLGIFFCVRCRHRRRQAERMSQIKRLLSEKKTCQCPHRFQKTCSPI

SEQ ID NO: 501 - protein, 633 aa, Artificial Sequence
  Description of Artificial Sequence: Synthetic polypeptide
MALPVTALLLPLALLLHAARPEVKLVESGGGLVQPGGSLKLSCTTSGFTFSSYGLSWIRQTPDKRLELVASINRNGDNTYYTDSVKGRFTISRDNAKNTLNLQMSSLKSEDTAMYYCTRGGFSYWGQGTLVTVSAGSTSGSGKPGSGEGSTKGQIVLTQSPAIMSASPGEKVTMTCSASSSVSYMYWYQQKPGSSPRLLIYDTSNLASGVPVRFSGSGSGTSYSLTISRMEAEDAATYYCQQWTGYPPITFGAGTKLELKEQKLISEEDLNPGGGGGSGGGGSGGGGSGGGGSGSMDIQMTQSPSSLSASVGDRVTITCRASQDIRNYLNWYQQKPGKAPKLLIYYTSRLESGVPSRFSGSGSGTDYTLTISSLQPEDFATYYCQQGNTLPWTFGQGTKVEIKGGGGSGGGGSGGGGSEVQLVESGGGLVQPGGSLRLSCAASGYSFTGYTMNWVRQAPGKGLEWVALINPTKGVSTYNQKFKDRFTISVDKSKNTAYLQMNSLRAEDTAVYYCARSGYYGDSDWYFDVWGQGTLVTVSSTSGGGGSLESGQVLLESNIKVLPTWSTPVQPMALIVLGGVAGLLLFIGLGIFFCVRCRHRRRQAERMSQIKRLLSEKKTCQCPHRFQKTCSPI

SEQ ID NO: 502 - protein, 633 aa, Artificial Sequence
  Description of Artificial Sequence: Synthetic polypeptide
MALPVTALLLPLALLLHAARPEVKLVESGGVLVQPGGSLKLSCAASGFTFSSYGMSWVRQTPDKRLELVASINKNGGSTYYPDSVKGRFTISRDNAKTTVYLQMSSLKSEDTAMYYCTRGGFAYWGQGTLVTVSAGSTSGSGKPGSGEGSTKGQIVLTQSPAIMSASPGEKVTLTCSASSSVGYMYWYQQRPGSSPRLLIYDTSNLPSGVPVRFSGSGSGTSYSLTISRMEAEDAATYYCQQWSGYPPITFGAGTKLELKEQKLISEEDLNPGGGGGSGGGGSGGGGSGGGGSGSMDIQMTQSPSSLSASVGDRVTITCRASQDIRNYLNWYQQKPGKAPKLLIYYTSRLESGVPSRFSGSGSGTDYTLTISSLQPEDFATYYCQQGNTLPWTFGQGTKVEIKGGGGSGGGGSGGGGSEVQLVESGGGLVQPGGSLRLSCAASGYSFTGYTMNWVRQAPGKGLEWVALINPTKGVSTYNQKFKDRFTISVDKSKNTAYLQMNSLRAEDTAVYYCARSGYYGDSDWYFDVWGQGTLVTVSSTSGGGGSLESGQVLLESNIKVLPTWSTPVQPMALIVLGGVAGLLLFIGLGIFFCVRCRHRRRQAERMSQIKRLLSEKKTCQCPHRFQKTCSPI

SEQ ID NO: 503 - protein, 513 aa, Artificial Sequence
  Description of Artificial Sequence: Synthetic polypeptide
MALPVTALLLPLALLLHAARPQLQLQESGGGLVQAGGSLRLSCAASGRTGSSYAMGWFRQAPGKEREFVAAITWSGGITAYADSVKGRFTISRDNAKNTVYLQMNSLKPEDTAVYCCAAGVTGSPSFDSWGQGTQVTVSSEQKLISEEDLNPGGGGGSGGGGSGGGGSGGGGSGSMDIQMTQSPSSLSASVGDRVTITCRASQDIRNYLNWYQQKPGKAPKLLIYYTSRLESGVPSRFSGSGSGTDYTLTISSLQPEDFATYYCQQGNTLPWTFGQGTKVEIKGGGGSGGGGSGGGGSEVQLVESGGGLVQPGGSLRLSCAASGYSFTGYTMNWVRQAPGKGLEWVALINPTKGVSTYNQKFKDRFTISVDKSKNTAYLQMNSLRAEDTAVYYCARSGYYGDSDWYFDVWGQGTLVTVSSTSGGGGSLESGQVLLESNIKVLPTWSTPVQPMALIVLGGVAGLLLFIGLGIFFCVRCRHRRRQAERMSQIKRLLSEKKTCQCPHRFQKTCSPI

SEQ ID NO: 504 - protein, 513 aa, Artificial Sequence
  Description of Artificial Sequence: Synthetic polypeptide
MALPVTALLLPLALLLHAARPQVQLQESGGGLVQAGGSLRLSCAASGRTFSSYAMGWFRQAPGKEREFVAAISGSGGSIYYGDSVKGRFTISRDNAKNTMYLQMNRLKPEDTAVYYCAAGPLGSPDFDSWGQGTQVTVSSEQKLISEEDLNPGGGGGSGGGGSGGGGSGGGGSGSMDIQMTQSPSSLSASVGDRVTITCRASQDIRNYLNWYQQKPGKAPKLLIYYTSRLESGVPSRFSGSGSGTDYTLTISSLQPEDFATYYCQQGNTLPWTFGQGTKVEIKGGGGSGGGGSGGGGSEVQLVESGGGLVQPGGSLRLSCAASGYSFTGYTMNWVRQAPGKGLEWVALINPTKGVSTYNQKFKDRFTISVDKSKNTAYLQMNSLRAEDTAVYYCARSGYYGDSDWYFDVWGQGTLVTVSSTSGGGGSLESGQVLLESNIKVLPTWSTPVQPMALIVLGGVAGLLLFIGLGIFFCVRCRHRRRQAERMSQIKRLLSEKKTCQCPHRFQKTCSPI

SEQ ID NO: 505 - protein, 513 aa, Artificial Sequence
  Description of Artificial Sequence: Synthetic polypeptide
MALPVTALLLPLALLLHAARPEVQVVESGGGLVQPGGSLRLSCVASGRTFSSYAMGWFRQAPGKEREFVAAISGSGGSIYYGDSVKGRFTISRDNAKNTMYLQMNRLKPEDTAVYYCAAGPLGSPDFDSWGQGTQVTVSSEQKLISEEDLNPGGGGGSGGGGSGGGGSGGGGSGSMDIQMTQSPSSLSASVGDRVTITCRASQDIRNYLNWYQQKPGKAPKLLIYYTSRLESGVPSRFSGSGSGTDYTLTISSLQPEDFATYYCQQGNTLPWTFGQGTKVEIKGGGGSGGGGSGGGGSEVQLVESGGGLVQPGGSLRLSCAASGYSFTGYTMNWVRQAPGKGLEWVALINPTKGVSTYNQKFKDRFTISVDKSKNTAYLQMNSLRAEDTAVYYCARSGYYGDSDWYFDVWGQGTLVTVSSTSGGGGSLESGQVLLESNIKVLPTWSTPVQPMALIVLGGVAGLLLFIGLGIFFCVRCRHRRRQAERMSQIKRLLSEKKTCQCPHRFQKTCSPI

SEQ ID NO: 506 - protein, 513 aa, Artificial Sequence
  Description of Artificial Sequence: Synthetic polypeptide
MALPVTALLLPLALLLHAARPKVQLVESGGGLVQAGGSLRLSCAASGRTGSSYAMGWFRQAPGKEREFVAAITWSGGITAYADSVKGRFTISRDNAKNTVYLQMNSLKPEDTAVYCCAAGVTGSPSFDSWGQGTQVTVSSEQKLISEEDLNPGGGGGSGGGGSGGGGSGGGGSGSMDIQMTQSPSSLSASVGDRVTITCRASQDIRNYLNWYQQKPGKAPKLLIYYTSRLESGVPSRFSGSGSGTDYTLTISSLQPEDFATYYCQQGNTLPWTFGQGTKVEIKGGGGSGGGGSGGGGSEVQLVESGGGLVQPGGSLRLSCAASGYSFTGYTMNWVRQAPGKGLEWVALINPTKGVSTYNQKFKDRFTISVDKSKNTAYLQMNSLRAEDTAVYYCARSGYYGDSDWYFDVWGQGTLVTVSSTSGGGGSLESGQVLLESNIKVLPTWSTPVQPMALIVLGGVAGLLLFIGLGIFFCVRCRHRRRQAERMSQIKRLLSEKKTCQCPHRFQKTCSPI

SEQ ID NO: 507 - protein, 513 aa, Artificial Sequence
  Description of Artificial Sequence: Synthetic polypeptide
MALPVTALLLPLALLLHAARPEVQLVESGGGLVQAGGSLRLSCAASGRTFSSYAMGWFRQAPGKEREFVAAISGSGGVTFYAHSVKGRFTISRDNAKNTVYLQMNSLKPEDTAVYSCAGGAHGSPDFGSWGQGTQVTVSSEQKLISEEDLNPGGGGGSGGGGSGGGGSGGGGSGSMDIQMTQSPSSLSASVGDRVTITCRASQDIRNYLNWYQQKPGKAPKLLIYYTSRLESGVPSRFSGSGSGTDYTLTISSLQPEDFATYYCQQGNTLPWTFGQGTKVEIKGGGGSGGGGSGGGGSEVQLVESGGGLVQPGGSLRLSCAASGYSFTGYTMNWVRQAPGKGLEWVALINPTKGVSTYNQKFKDRFTISVDKSKNTAYLQMNSLRAEDTAVYYCARSGYYGDSDWYFDVWGQGTLVTVSSTSGGGGSLESGQVLLESNIKVLPTWSTPVQPMALIVLGGVAGLLLFIGLGIFFCVRCRHRRRQAERMSQIKRLLSEKKTCQCPHRFQKTCSPI

SEQ ID NO: 508 - protein, 509 aa, Artificial Sequence
  Description of Artificial Sequence: Synthetic polypeptide
MALPVTALLLPLALLLHAARPQVQLVESGGGLVQPGGSLRLSCAVSRNIASLYRVDWYRQAPGKQRELVAGRTSGGTTTYLDAVEGRFTISRDNVKDTVYLQMNSLTPEDTAVYYCHAHDHWRDSWGQGTQVTVSSEQKLISEEDLNPGGGGGSGGGGSGGGGSGGGGSGSMDIQMTQSPSSLSASVGDRVTITCRASQDIRNYLNWYQQKPGKAPKLLIYYTSRLESGVPSRFSGSGSGTDYTLTISSLQPEDFATYYCQQGNTLPWTFGQGTKVEIKGGGGSGGGGSGGGGSEVQLVESGGGLVQPGGSLRLSCAASGYSFTGYTMNWVRQAPGKGLEWVALINPTKGVSTYNQKFKDRFTISVDKSKNTAYLQMNSLRAEDTAVYYCARSGYYGDSDWYFDVWGQGTLVTVSSTSGGGGSLESGQVLLESNIKVLPTWSTPVQPMALIVLGGVAGLLLFIGLGIFFCVRCRHRRRQAERMSQIKRLLSEKKTCQCPHRFQKTCSPI

SEQ ID NO: 509 - protein, 509 aa, Artificial Sequence
  Description of Artificial Sequence: Synthetic polypeptide
MALPVTALLLPLALLLHAARPQVQLVESGGDLVQPGGSLRLSCAASGSIGSIYAMGWYRQAPGRQRELVATTTSGGTTNYADSVKGRFTIAGDNAKNTVFLQMNSLRPEDTAVYYCKIQTHWYVYWGQGTQVTVSSEQKLISEEDLNPGGGGGSGGGGSGGGGSGGGGSGSMDIQMTQSPSSLSASVGDRVTITCRASQDIRNYLNWYQQKPGKAPKLLIYYTSRLESGVPSRFSGSGSGTDYTLTISSLQPEDFATYYCQQGNTLPWTFGQGTKVEIKGGGGSGGGGSGGGGSEVQLVESGGGLVQPGGSLRLSCAASGYSFTGYTMNWVRQAPGKGLEWVALINPTKGVSTYNQKFKDRFTISVDKSKNTAYLQMNSLRAEDTAVYYCARSGYYGDSDWYFDVWGQGTLVTVSSTSGGGGSLESGQVLLESNIKVLPTWSTPVQPMALIVLGGVAGLLLFIGLGIFFCVRCRHRRRQAERMSQIKRLLSEKKTCQCPHRFQKTCSPI

SEQ ID NO: 510 - protein, 509 aa, Artificial Sequence
  Description of Artificial Sequence: Synthetic polypeptide
MALPVTALLLPLALLLHAARPEVQLVESGGGLVQPGGSLRLSCAASRNIFSLYRVDWYRQAPGKQRELVAGSTSGGTTTYADAVKGRFTISTDNVKDTVYLQMNSLTPEDTAVYYCHAHDHWRDSWGQGTQVTVSSEQKLISEEDLNPGGGGGSGGGGSGGGGSGGGGSGSMDIQMTQSPSSLSASVGDRVTITCRASQDIRNYLNWYQQKPGKAPKLLIYYTSRLESGVPSRFSGSGSGTDYTLTISSLQPEDFATYYCQQGNTLPWTFGQGTKVEIKGGGGSGGGGSGGGGSEVQLVESGGGLVQPGGSLRLSCAASGYSFTGYTMNWVRQAPGKGLEWVALINPTKGVSTYNQKFKDRFTISVDKSKNTAYLQMNSLRAEDTAVYYCARSGYYGDSDWYFDVWGQGTLVTVSSTSGGGGSLESGQVLLESNIKVLPTWSTPVQPMALIVLGGVAGLLLFIGLGIFFCVRCRHRRRQAERMSQIKRLLSEKKTCQCPHRFQKTCSPI

SEQ ID NO: 511 - protein, 509 aa, Artificial Sequence
  Description of Artificial Sequence: Synthetic polypeptide
MALPVTALLLPLALLLHAARPQVQLVESGGGWVHPGGSLRLSCAASRNIFSMYRVDWYRQAPGKQRELVAGITSGGTTSYADAVKGRFTISTDNVKDTVYLQMNSVTPEDTAVYYCHAHDHWRDSWGQGTQVTVSSEQKLISEEDLNPGGGGGSGGGGSGGGGSGGGGSGSMDIQMTQSPSSLSASVGDRVTITCRASQDIRNYLNWYQQKPGKAPKLLIYYTSRLESGVPSRFSGSGSGTDYTLTISSLQPEDFATYYCQQGNTLPWTFGQGTKVEIKGGGGSGGGGSGGGGSEVQLVESGGGLVQPGGSLRLSCAASGYSFTGYTMNWVRQAPGKGLEWVALINPTKGVSTYNQKFKDRFTISVDKSKNTAYLQMNSLRAEDTAVYYCARSGYYGDSDWYFDVWGQGTLVTVSSTSGGGGSLESGQVLLESNIKVLPTWSTPVQPMALIVLGGVAGLLLFIGLGIFFCVRCRHRRRQAERMSQIKRLLSEKKTCQCPHRFQKTCSPI

SEQ ID NO: 512 - protein, 509 aa, Artificial Sequence
  Description of Artificial Sequence: Synthetic polypeptide
MALPVTALLLPLALLLHAARPEVQVQESGGDLVQPGGSLRLSCAASGSIGSIYRKGWYRQAPGSQRELVATITSAGTTNYADSVKGRFTISRDNAKNTVYLQMNSLRPEDTAVYYCNFQTHWYVYWGQGTQVTVSSEQKLISEEDLNPGGGGGSGGGGSGGGGSGGGGSGSMDIQMTQSPSSLSASVGDRVTITCRASQDIRNYLNWYQQKPGKAPKLLIYYTSRLESGVPSRFSGSGSGTDYTLTISSLQPEDFATYYCQQGNTLPWTFGQGTKVEIKGGGGSGGGGSGGGGSEVQLVESGGGLVQPGGSLRLSCAASGYSFTGYTMNWVRQAPGKGLEWVALINPTKGVSTYNQKFKDRFTISVDKSKNTAYLQMNSLRAEDTAVYYCARSGYYGDSDWYFDVWGQGTLVTVSSTSGGGGSLESGQVLLESNIKVLPTWSTPVQPMALIVLGGVAGLLLFIGLGIFFCVRCRHRRRQAERMSQIKRLLSEKKTCQCPHRFQKTCSPI

SEQ ID NO: 513 - protein, 509 aa, Artificial Sequence
  Description of Artificial Sequence: Synthetic polypeptide
MALPVTALLLPLALLLHAARPEVRLVESGGGLVQPGGSLRLSCAVSKNIFSIYRVDWYHQAPGKQRELVAGWTSGGSTSYADAVKGRFTISTDNVKDTVYLQMNSLTPEDTAVYYCHAHDHWRDYWGQGTQVTVSSEQKLISEEDLNPGGGGGSGGGGSGGGGSGGGGSGSMDIQMTQSPSSLSASVGDRVTITCRASQDIRNYLNWYQQKPGKAPKLLIYYTSRLESGVPSRFSGSGSGTDYTLTISSLQPEDFATYYCQQGNTLPWTFGQGTKVEIKGGGGSGGGGSGGGGSEVQLVESGGGLVQPGGSLRLSCAASGYSFTGYTMNWVRQAPGKGLEWVALINPTKGVSTYNQKFKDRFTISVDKSKNTAYLQMNSLRAEDTAVYYCARSGYYGDSDWYFDVWGQGTLVTVSSTSGGGGSLESGQVLLESNIKVLPTWSTPVQPMALIVLGGVAGLLLFIGLGIFFCVRCRHRRRQAERMSQIKRLLSEKKTCQCPHRFQKTCSPI

SEQ ID NO: 514 - protein, 120 aa, Artificial Sequence
  Description of Artificial Sequence: Synthetic polypeptide
QVQLQESGGGLVQPGGSLRLSCAASGIIFSINTMAWYRQGPGKQRDLVALISSGGNTSYADSVNGRFTISRDNAKNTVYLQMNGLKPEDTAVYYCNSAGRSYSGSYGAYWGQGTQVTVSS

SEQ ID NO: 515 - protein, 115 aa, Artificial Sequence
  Description of Artificial Sequence: Synthetic polypeptide
EVQLVESGGGLVQPGGSLRLSCAASRSIFVIAFMDWYRQAPGKQREFVAGISSSGATSYASSVKGRFTVSRDTAKNTMYLQMNNLLPEDSAVYYCKADTATTTDWGQGTQVTVSS

SEQ ID NO: 516 - protein, 115 aa, Artificial Sequence
  Description of Artificial Sequence: Synthetic polypeptide
QVQLQESGGGLVQPGGSLRLSCAASRSIFGIAFMDWYRQAPGKQREFVAGISHSGATSYADSVKGRFTVSRDNAKNTMYLQMNNLLPEDSAVYYCKADTATNTDWGQGTQVTVSS

SEQ ID NO: 517 - protein, 120 aa, Artificial Sequence
  Description of Artificial Sequence: Synthetic polypeptide
QLQLVESGGGLVQAGGSLRLSCAVSGNIWVFTVMAWYRQVPGKQRELVAASTNGGSTNYADSVKGRFTISRDNVKNTVYLQMNSLKPEDTAVYYCNRQRTVIGMNPLAPWGQGTQVTVSS

SEQ ID NO: 518 - protein, 115 aa, Artificial Sequence
  Description of Artificial Sequence: Synthetic polypeptide
QVQLVESGGGLVQPGGSLRLSCATSGIIFHIYTMGWYRGAPGKQRELVARITSGGDTNYADSVKGRFTISRDNVKNTMYLQMNSLKPEDTAVYYCNRFPGATFSWGQGTQVTVSS

SEQ ID NO: 519 - protein, 120 aa, Artificial Sequence
  Description of Artificial Sequence: Synthetic polypeptide
EVQLVESGGGLVQPGGSLRLSCAASGIIFSINTMAWYRQGPGKERDLVAVIKGDGSTSYADSVNGRFTISRDNAKNTVYLRMNGLKPEDTAVYYCNSAGRSYSGVYGAYWGQGTQVTVSS

SEQ ID NO: 520 - protein, 120 aa, Artificial Sequence
  Description of Artificial Sequence: Synthetic polypeptide
EVQLQESGGGLVQPGGSLKLSCAASGSIFSIGAMRWYRQVPGNERELVAGITNGGNTNYADSVKARFTISRDNAKNTVYLQMNSLKPEDTTVYFCNADVQNSGYVWGNYWGQGTQVTVSS

SEQ ID NO: 521 - protein, 115 aa, Artificial Sequence
  Description of Artificial Sequence: Synthetic polypeptide
EVQLVESGGGLVQPGGSLRLSCAASRSIFVIAFMDWYRQAPGKQREFVAGISSSGATSYADSVKGRFTVSRDTAKNTMYLQMNNLLPEDSAVYYCKADTATNTDWGQGTQVTVSS

SEQ ID NO: 522 - protein, 10 aa, Artificial Sequence
  Description of Artificial Sequence: Synthetic peptide
GIIFSINTMA

SEQ ID NO: 523 - protein, 13 aa, Artificial Sequence
  Description of Artificial Sequence: Synthetic peptide
LISSGGNTSYADS

SEQ ID NO: 524 - protein, 14 aa, Artificial Sequence
  Description of Artificial Sequence: Synthetic peptide
NSAGRSYSGSYGAY

SEQ ID NO: 525 - protein, 10 aa, Artificial Sequence
  Description of Artificial Sequence: Synthetic peptide
RSIFVIAFMD

SEQ ID NO: 526 - protein, 13 aa, Artificial Sequence
  Description of Artificial Sequence: Synthetic peptide
GISSSGATSYASS

SEQ ID NO: 527 - protein, 9 aa, Artificial Sequence
  Description of Artificial Sequence: Synthetic peptide
KADTATTTD

SEQ ID NO: 528 - protein, 10 aa, Artificial Sequence
  Description of Artificial Sequence: Synthetic peptide
RSIFGIAFMD

SEQ ID NO: 529 - protein, 13 aa, Artificial Sequence
  Description of Artificial Sequence: Synthetic peptide
GISHSGATSYADS

SEQ ID NO: 530 - protein, 9 aa, Artificial Sequence
  Description of Artificial Sequence: Synthetic peptide
KADTATNTD

SEQ ID NO: 531 - protein, 10 aa, Artificial Sequence
  Description of Artificial Sequence: Synthetic peptide
GNIWVFTVMA

SEQ ID NO: 532 - protein, 13 aa, Artificial Sequence
  Description of Artificial Sequence: Synthetic peptide
ASTNGGSTNYADS

SEQ ID NO: 533 - protein, 14 aa, Artificial Sequence
  Description of Artificial Sequence: Synthetic peptide
NRQRTVIGMNPLAP

SEQ ID NO: 534 - protein, 10 aa, Artificial Sequence
  Description of Artificial Sequence: Synthetic peptide
GIIFHIYTMG

SEQ ID NO: 535 - protein, 13 aa, Artificial Sequence
  Description of Artificial Sequence: Synthetic peptide
RITSGGDTNYADS

SEQ ID NO: 536 - protein, 9 aa, Artificial Sequence
  Description of Artificial Sequence: Synthetic peptide
NRFPGATFS

SEQ ID NO: 537 - protein, 10 aa, Artificial Sequence
  Description of Artificial Sequence: Synthetic peptide
GIIFSINTMA

SEQ ID NO: 538 - protein, 13 aa, Artificial Sequence
  Description of Artificial Sequence: Synthetic peptide
VIKGDGSTSYADS

SEQ ID NO: 539 - protein, 14 aa, Artificial Sequence
  Description of Artificial Sequence: Synthetic peptide
NSAGRSYSGVYGAY

SEQ ID NO: 540 - protein, 10 aa, Artificial Sequence
  Description of Artificial Sequence: Synthetic peptide
GSIFSIGAMR

SEQ ID NO: 541 - protein, 13 aa, Artificial Sequence
  Description of Artificial Sequence: Synthetic peptide
GITNGGNTNYADS

SEQ ID NO: 542 - protein, 14 aa, Artificial Sequence
  Description of Artificial Sequence: Synthetic peptide
NADVQNSGYVWGNY

SEQ ID NO: 543 - protein, 10 aa, Artificial Sequence
  Description of Artificial Sequence: Synthetic peptide
RSIFVIAFMD

SEQ ID NO: 544 - protein, 13 aa, Artificial Sequence
  Description of Artificial Sequence: Synthetic peptide
GISSSGATSYADS

SEQ ID NO: 545 - protein, 9 aa, Artificial Sequence
  Description of Artificial Sequence: Synthetic peptide
KADTATNTD

SEQ ID NO: 546 - protein, 514 aa, Artificial Sequence
  Description of Artificial Sequence: Synthetic polypeptide
MALPVTALLLPLALLLHAARPQVQLQESGGGLVQPGGSLRLSCAASGIIFSINTMAWYRQGPGKQRDLVALISSGGNTSYADSVNGRFTISRDNAKNTVYLQMNGLKPEDTAVYYCNSAGRSYSGSYGAYWGQGTQVTVSSEQKLISEEDLNPGGGGGSGGGGSGGGGSGGGGSGSMDIQMTQSPSSLSASVGDRVTITCRASQDIRNYLNWYQQKPGKAPKLLIYYTSRLESGVPSRFSGSGSGTDYTLTISSLQPEDFATYYCQQGNTLPWTFGQGTKVEIKGGGGSGGGGSGGGGSEVQLVESGGGLVQPGGSLRLSCAASGYSFTGYTMNWVRQAPGKGLEWVALINPTKGVSTYNQKFKDRFTISVDKSKNTAYLQMNSLRAEDTAVYYCARSGYYGDSDWYFDVWGQGTLVTVSSTSGGGGSLESGQVLLESNIKVLPTWSTPVQPMALIVLGGVAGLLLFIGLGIFFCVRCRHRRRQAERMSQIKRLLSEKKTCQCPHRFQKTCSPI

SEQ ID NO: 547 - protein, 509 aa, Artificial Sequence
  Description of Artificial Sequence: Synthetic polypeptide
MALPVTALLLPLALLLHAARPEVQLVESGGGLVQPGGSLRLSCAASRSIFVIAFMDWYRQAPGKQREFVAGISSSGATSYASSVKGRFTVSRDTAKNTMYLQMNNLLPEDSAVYYCKADTATTTDWGQGTQVTVSSEQKLISEEDLNPGGGGGSGGGGSGGGGSGGGGSGSMDIQMTQSPSSLSASVGDRVTITCRASQDIRNYLNWYQQKPGKAPKLLIYYTSRLESGVPSRFSGSGSGTDYTLTISSLQPEDFATYYCQQGNTLPWTFGQGTKVEIKGGGGSGGGGSGGGGSEVQLVESGGGLVQPGGSLRLSCAASGYSFTGYTMNWVRQAPGKGLEWVALINPTKGVSTYNQKFKDRFTISVDKSKNTAYLQMNSLRAEDTAVYYCARSGYYGDSDWYFDVWGQGTLVTVSSTSGGGGSLESGQVLLESNIKVLPTWSTPVQPMALIVLGGVAGLLLFIGLGIFFCVRCRHRRRQAERMSQIKRLLSEKKTCQCPHRFQKTCSPI

SEQ ID NO: 548 - protein, 509 aa, Artificial Sequence
  Description of Artificial Sequence: Synthetic polypeptide
MALPVTALLLPLALLLHAARPQVQLQESGGGLVQPGGSLRLSCAASRSIFGIAFMDWYRQAPGKQREFVAGISHSGATSYADSVKGRFTVSRDNAKNTMYLQMNNLLPEDSAVYYCKADTATNTDWGQGTQVTVSSEQKLISEEDLNPGGGGGSGGGGSGGGGSGGGGSGSMDIQMTQSPSSLSASVGDRVTITCRASQDIRNYLNWYQQKPGKAPKLLIYYTSRLESGVPSRFSGSGSGTDYTLTISSLQPEDFATYYCQQGNTLPWTFGQGTKVEIKGGGGSGGGGSGGGGSEVQLVESGGGLVQPGGSLRLSCAASGYSFTGYTMNWVRQAPGKGLEWVALINPTKGVSTYNQKFKDRFTISVDKSKNTAYLQMNSLRAEDTAVYYCARSGYYGDSDWYFDVWGQGTLVTVSSTSGGGGSLESGQVLLESNIKVLPTWSTPVQPMALIVLGGVAGLLLFIGLGIFFCVRCRHRRRQAERMSQIKRLLSEKKTCQCPHRFQKTCSPI

SEQ ID NO: 549 - protein, 514 aa, Artificial Sequence
  Description of Artificial Sequence: Synthetic polypeptide
MALPVTALLLPLALLLHAARPQLQLVESGGGLVQAGGSLRLSCAVSGNIWVFTVMAWYRQVPGKQRELVAASTNGGSTNYADSVKGRFTISRDNVKNTVYLQMNSLKPEDTAVYYCNRQRTVIGMNPLAPWGQGTQVTVSSEQKLISEEDLNPGGGGGSGGGGSGGGGSGGGGSGSMDIQMTQSPSSLSASVGDRVTITCRASQDIRNYLNWYQQKPGKAPKLLIYYTSRLESGVPSRFSGSGSGTDYTLTISSLQPEDFATYYCQQGNTLPWTFGQGTKVEIKGGGGSGGGGSGGGGSEVQLVESGGGLVQPGGSLRLSCAASGYSFTGYTMNWVRQAPGKGLEWVALINPTKGVSTYNQKFKDRFTISVDKSKNTAYLQMNSLRAEDTAVYYCARSGYYGDSDWYFDVWGQGTLVTVSSTSGGGGSLESGQVLLESNIKVLPTWSTPVQPMALIVLGGVAGLLLFIGLGIFFCVRCRHRRRQAERMSQIKRLLSEKKTCQCPHRFQKTCSPI

SEQ ID NO: 550 - protein, 509 aa, Artificial Sequence
  Description of Artificial Sequence: Synthetic polypeptide
MALPVTALLLPLALLLHAARPQVQLVESGGGLVQPGGSLRLSCATSGIIFHIYTMGWYRGAPGKQRELVARITSGGDTNYADSVKGRFTISRDNVKNTMYLQMNSLKPEDTAVYYCNRFPGATFSWGQGTQVTVSSEQKLISEEDLNPGGGGGSGGGGSGGGGSGGGGSGSMDIQMTQSPSSLSASVGDRVTITCRASQDIRNYLNWYQQKPGKAPKLLIYYTSRLESGVPSRFSGSGSGTDYTLTISSLQPEDFATYYCQQGNTLPWTFGQGTKVEIKGGGGSGGGGSGGGGSEVQLVESGGGLVQPGGSLRLSCAASGYSFTGYTMNWVRQAPGKGLEWVALINPTKGVSTYNQKFKDRFTISVDKSKNTAYLQMNSLRAEDTAVYYCARSGYYGDSDWYFDVWGQGTLVTVSSTSGGGGSLESGQVLLESNIKVLPTWSTPVQPMALIVLGGVAGLLLFIGLGIFFCVRCRHRRRQAERMSQIKRLLSEKKTCQCPHRFQKTCSPI

SEQ ID NO: 551 - protein, 514 aa, Artificial Sequence
  Description of Artificial Sequence: Synthetic polypeptide
MALPVTALLLPLALLLHAARPEVQLVESGGGLVQPGGSLRLSCAASGIIFSINTMAWYRQGPGKERDLVAVIKGDGSTSYADSVNGRFTISRDNAKNTVYLRMNGLKPEDTAVYYCNSAGRSYSGVYGAYWGQGTQVTVSSEQKLISEEDLNPGGGGGSGGGGSGGGGSGGGGSGSMDIQMTQSPSSLSASVGDRVTITCRASQDIRNYLNWYQQKPGKAPKLLIYYTSRLESGVPSRFSGSGSGTDYTLTISSLQPEDFATYYCQQGNTLPWTFGQGTKVEIKGGGGSGGGGSGGGGSEVQLVESGGGLVQPGGSLRLSCAASGYSFTGYTMNWVRQAPGKGLEWVALINPTKGVSTYNQKFKDRFTISVDKSKNTAYLQMNSLRAEDTAVYYCARSGYYGDSDWYFDVWGQGTLVTVSSTSGGGGSLESGQVLLESNIKVLPTWSTPVQPMALIVLGGVAGLLLFIGLGIFFCVRCRHRRRQAERMSQIKRLLSEKKTCQCPHRFQKTCSPI

SEQ ID NO: 552 - protein, 514 aa, Artificial Sequence
  Description of Artificial Sequence: Synthetic polypeptide
MALPVTALLLPLALLLHAARPEVQLQESGGGLVQPGGSLKLSCAASGSIFSIGAMRWYRQVPGNERELVAGITNGGNTNYADSVKARFTISRDNAKNTVYLQMNSLKPEDTTVYFCNADVQNSGYVWGNYWGQGTQVTVSSEQKLISEEDLNPGGGGGSGGGGSGGGGSGGGGSGSMDIQMTQSPSSLSASVGDRVTITCRASQDIRNYLNWYQQKPGKAPKLLIYYTSRLESGVPSRFSGSGSGTDYTLTISSLQPEDFATYYCQQGNTLPWTFGQGTKVEIKGGGGSGGGGSGGGGSEVQLVESGGGLVQPGGSLRLSCAASGYSFTGYTMNWVRQAPGKGLEWVALINPTKGVSTYNQKFKDRFTISVDKSKNTAYLQMNSLRAEDTAVYYCARSGYYGDSDWYFDVWGQGTLVTVSSTSGGGGSLESGQVLLESNIKVLPTWSTPVQPMALIVLGGVAGLLLFIGLGIFFCVRCRHRRRQAERMSQIKRLLSEKKTCQCPHRFQKTCSPI

SEQ ID NO: 553 - protein, 509 aa, Artificial Sequence
  Description of Artificial Sequence: Synthetic polypeptide
MALPVTALLLPLALLLHAARPEVQLVESGGGLVQPGGSLRLSCAASRSIFVIAFMDWYRQAPGKQREFVAGISSSGATSYADSVKGRFTVSRDTAKNTMYLQMNNLLPEDSAVYYCKADTATNTDWGQGTQVTVSSEQKLISEEDLNPGGGGGSGGGGSGGGGSGGGGSGSMDIQMTQSPSSLSASVGDRVTITCRASQDIRNYLNWYQQKPGKAPKLLIYYTSRLESGVPSRFSGSGSGTDYTLTISSLQPEDFATYYCQQGNTLPWTFGQGTKVEIKGGGGSGGGGSGGGGSEVQLVESGGGLVQPGGSLRLSCAASGYSFTGYTMNWVRQAPGKGLEWVALINPTKGVSTYNQKFKDRFTISVDKSKNTAYLQMNSLRAEDTAVYYCARSGYYGDSDWYFDVWGQGTLVTVSSTSGGGGSLESGQVLLESNIKVLPTWSTPVQPMALIVLGGVAGLLLFIGLGIFFCVRCRHRRRQAERMSQIKRLLSEKKTCQCPHRFQKTCSPI

SEQ ID NO: 554 - protein, 633 aa, Artificial Sequence
  Description of Artificial Sequence: Synthetic polypeptide
MALPVTALLLPLALLLHAARPEVKLVESGGGLVQPGGSLKLSCAASGFTFSSYGLSWVRQTPDKGLELVASINRNGGNTYYTDSVKGRFTISRDNAKNTLNLQMSSLKSEDTAMYYCARGGFTYWGQGTLVTVSAGSTSGSGKPGSGEGSTKGQIVLTQSPAIMSAFPGEKVTMTCSASSSVGYMYWYQQKPGSSPRLLIYDTSNLASGVPVRFSGSGSGTAYSLTISRMEAEDAATYYCQQWSGYPPITFGAGTKLELKEQKLISEEDLNPGGGGGSGGGGSGGGGSGGGGSGSMDIQMTQSPSSLSASVGDRVTITCRASQDIRNYLNWYQQKPGKAPKLLIYYTSRLESGVPSRFSGSGSGTDYTLTISSLQPEDFATYYCQQGNTLPWTFGQGTKVEIKGGGGSGGGGSGGGGSEVQLVESGGGLVQPGGSLRLSCAASGYSFTGYTMNWVRQAPGKGLEWVALINPYKGVSTYNQKFKDRFTISVDKSKNTAYLQMNSLRAEDTAVYYCARSGYYGDSDWYFDVWGQGTLVTVSSTSGGGGSLESGQVLLESNIKVLPTWSTPVQPMALIVLGGVAGLLLFIGLGIFFCVRCRHRRRQAERMSQIKRLLSEKKTCQCPHRFQKTCSPI

SEQ ID NO: 555 - protein, 633 aa, Artificial Sequence
  Description of Artificial Sequence: Synthetic polypeptide
MALPVTALLLPLALLLHAARPQIVLTQSPAIMSAFPGEKVTMTCSASSSVGYMYWYQQKPGSSPRLLIYDTSNLASGVPVRFSGSGSGTAYSLTISRMEAEDAATYYCQQWSGYPPITFGAGTKLELKGSTSGSGKPGSGEGSTKGEVKLVESGGGLVQPGGSLKLSCAASGFTFSSYGLSWVRQTPDKGLELVASINRNGGNTYYTDSVKGRFTISRDNAKNTLNLQMSSLKSEDTAMYYCARGGFTYWGQGTLVTVSAEQKLISEEDLNPGGGGGSGGGGSGGGGSGGGGSGSMDIQMTQSPSSLSASVGDRVTITCRASQDIRNYLNWYQQKPGKAPKLLIYYTSRLESGVPSRFSGSGSGTDYTLTISSLQPEDFATYYCQQGNTLPWTFGQGTKVEIKGGGGSGGGGSGGGGSEVQLVESGGGLVQPGGSLRLSCAASGYSFTGYTMNWVRQAPGKGLEWVALINPYKGVSTYNQKFKDRFTISVDKSKNTAYLQMNSLRAEDTAVYYCARSGYYGDSDWYFDVWGQGTLVTVSSTSGGGGSLESGQVLLESNIKVLPTWSTPVQPMALIVLGGVAGLLLFIGLGIFFCVRCRHRRRQAERMSQIKRLLSEKKTCQCPHRFQKTCSPI

SEQ ID NO: 556 - protein, 633 aa, Artificial Sequence
  Description of Artificial Sequence: Synthetic polypeptide
MALPVTALLLPLALLLHAARPQVQLKESGGGLVQPGGSLKLSCTTSGFTFSSYGLSWIRQTPDKRLELVASINRNGDNTYYTDSVRGRFTISRDNAKSTLNLQMSSLKSEDTAMYYCTRGGFSYWGQGTLVTVSAGSTSGSGKPGSGEGSTKGQIVLTQSPPLMSASPGEKVTMTCSASSSVGYMYWFQQRPGSSPRLLIYDTYNLASGVPVRFSGSGSGTSYSLTISRLEAEDAATYYCQQWSGYPPITFGAGTKLELREQKLISEEDLNPGGGGGSGGGGSGGGGSGGGGSGSMDIQMTQSPSSLSASVGDRVTITCRASQDIRNYLNWYQQKPGKAPKLLIYYTSRLESGVPSRFSGSGSGTDYTLTISSLQPEDFATYYCQQGNTLPWTFGQGTKVEIKGGGGSGGGGSGGGGSEVQLVESGGGLVQPGGSLRLSCAASGYSFTGYTMNWVRQAPGKGLEWVALINPYKGVSTYNQKFKDRFTISVDKSKNTAYLQMNSLRAEDTAVYYCARSGYYGDSDWYFDVWGQGTLVTVSSTSGGGGSLESGQVLLESNIKVLPTWSTPVQPMALIVLGGVAGLLLFIGLGIFFCVRCRHRRRQAERMSQIKRLLSEKKTCQCPHRFQKTCSPI

SEQ ID NO: 557 - protein, 633 aa, Artificial Sequence
  Description of Artificial Sequence: Synthetic polypeptide
MALPVTALLLPLALLLHAARPQIVLTQSPPLMSASPGEKVTMTCSASSSVGYMYWFQQRPGSSPRLLIYDTYNLASGVPVRFSGSGSGTSYSLTISRLEAEDAATYYCQQWSGYPPITFGAGTKLELRGSTSGSGKPGSGEGSTKGQVQLKESGGGLVQPGGSLKLSCTTSGFTFSSYGLSWIRQTPDKRLELVASINRNGDNTYYTDSVRGRFTISRDNAKSTLNLQMSSLKSEDTAMYYCTRGGFSYWGQGTLVTVSAEQKLISEEDLNPGGGGGSGGGGSGGGGSGGGGSGSMDIQMTQSPSSLSASVGDRVTITCRASQDIRNYLNWYQQKPGKAPKLLIYYTSRLESGVPSRFSGSGSGTDYTLTISSLQPEDFATYYCQQGNTLPWTFGQGTKVEIKGGGGSGGGGSGGGGSEVQLVESGGGLVQPGGSLRLSCAASGYSFTGYTMNWVRQAPGKGLEWVALINPYKGVSTYNQKFKDRFTISVDKSKNTAYLQMNSLRAEDTAVYYCARSGYYGDSDWYFDVWGQGTLVTVSSTSGGGGSLESGQVLLESNIKVLPTWSTPVQPMALIVLGGVAGLLLFIGLGIFFCVRCRHRRRQAERMSQIKRLLSEKKTCQCPHRFQKTCSPI

SEQ ID NO: 558 - protein, 633 aa, Artificial Sequence
  Description of Artificial Sequence: Synthetic polypeptide
MALPVTALLLPLALLLHAARPQVQLKESGGGLVRPGGSLKLSCAASGFTFSNYGMSWIRQTPDKNLELVASINTSGGNTYYPDSVKGRFTISRDNARATLNLQMSNLKSEDTAIYYCTRGGFTHWGQGTLVAVSAGSTSGSGKPGSGEGSTKGQIVLTQSPAIMSASPGEKVTMTCSASSSVSYMYWYQQKPGSSPRLLIYDTSNLASGVPVRFSGSGSGTSYFLTISRMEAEDAATYYCQQWTGYPPITFGAGTKLELREQKLISEEDLNPGGGGGSGGGGSGGGGSGGGGSGSMDIQMTQSPSSLSASVGDRVTITCRASQDIRNYLNWYQQKPGKAPKLLIYYTSRLESGVPSRFSGSGSGTDYTLTISSLQPEDFATYYCQQGNTLPWTFGQGTKVEIKGGGGSGGGGSGGGGSEVQLVESGGGLVQPGGSLRLSCAASGYSFTGYTMNWVRQAPGKGLEWVALINPYKGVSTYNQKFKDRFTISVDKSKNTAYLQMNSLRAEDTAVYYCARSGYYGDSDWYFDVWGQGTLVTVSSTSGGGGSLESGQVLLESNIKVLPTWSTPVQPMALIVLGGVAGLLLFIGLGIFFCVRCRHRRRQAERMSQIKRLLSEKKTCQCPHRFQKTCSPI

SEQ ID NO: 559 - protein, 633 aa, Artificial Sequence
  Description of Artificial Sequence: Synthetic polypeptide
MALPVTALLLPLALLLHAARPQIVLTQSPAIMSASPGEKVTMTCSASSSVSYMYWYQQKPGSSPRLLIYDTSNLASGVPVRFSGSGSGTSYFLTISRMEAEDAATYYCQQWTGYPPITFGAGTKLELRGSTSGSGKPGSGEGSTKGQVQLKESGGGLVRPGGSLKLSCAASGFTFSNYGMSWIRQTPDKNLELVASINTSGGNTYYPDSVKGRFTISRDNARATLNLQMSNLKSEDTAIYYCTRGGFTHWGQGTLVAVSAEQKLISEEDLNPGGGGGSGGGGSGGGGSGGGGSGSMDIQMTQSPSSLSASVGDRVTITCRASQDIRNYLNWYQQKPGKAPKLLIYYTSRLESGVPSRFSGSGSGTDYTLTISSLQPEDFATYYCQQGNTLPWTFGQGTKVEIKGGGGSGGGGSGGGGSEVQLVESGGGLVQPGGSLRLSCAASGYSFTGYTMNWVRQAPGKGLEWVALINPYKGVSTYNQKFKDRFTISVDKSKNTAYLQMNSLRAEDTAVYYCARSGYYGDSDWYFDVWGQGTLVTVSSTSGGGGSLESGQVLLESNIKVLPTWSTPVQPMALIVLGGVAGLLLFIGLGIFFCVRCRHRRRQAERMSQIKRLLSEKKTCQCPHRFQKTCSPI

SEQ ID NO: 560 - protein, 633 aa, Artificial Sequence
  Description of Artificial Sequence: Synthetic polypeptide
MALPVTALLLPLALLLHAARPQVQLKESGGGLVQPGGSLKLSCAASGFPFSSYGLSWVRQTPDKRLELVATINRNGDSAYYPDSVKGRFTISRDDAKNTLYLQMSSLKSEDTAMYYCTRGGFAYWGQGTLVTVSAGSTSGSGKPGSGEGSTKGQIVLTQSPAIMSASPGEKVTMTCSGSSSVGYMYWYQQKPGFSPRLLIYDTSNLASGVPVRFSGSGSGTSYSLTISRMEAEDAATYYCQQWSGYPPITFGAGTKLELKEQKLISEEDLNPGGGGGSGGGGSGGGGSGGGGSGSMDIQMTQSPSSLSASVGDRVTITCRASQDIRNYLNWYQQKPGKAPKLLIYYTSRLESGVPSRFSGSGSGTDYTLTISSLQPEDFATYYCQQGNTLPWTFGQGTKVEIKGGGGSGGGGSGGGGSEVQLVESGGGLVQPGGSLRLSCAASGYSFTGYTMNWVRQAPGKGLEWVALINPYKGVSTYNQKFKDRFTISVDKSKNTAYLQMNSLRAEDTAVYYCARSGYYGDSDWYFDVWGQGTLVTVSSTSGGGGSLESGQVLLESNIKVLPTWSTPVQPMALIVLGGVAGLLLFIGLGIFFCVRCRHRRRQAERMSQIKRLLSEKKTCQCPHRFQKTCSPI

SEQ ID NO: 561 - protein, 633 aa, Artificial Sequence
  Description of Artificial Sequence: Synthetic polypeptide
MALPVTALLLPLALLLHAARPQIVLTQSPAIMSASPGEKVTMTCSGSSSVGYMYWYQQKPGFSPRLLIYDTSNLASGVPVRFSGSGSGTSYSLTISRMEAEDAATYYCQQWSGYPPITFGAGTKLELKGSTSGSGKPGSGEGSTKGQVQLKESGGGLVQPGGSLKLSCAASGFPFSSYGLSWVRQTPDKRLELVATINRNGDSAYYPDSVKGRFTISRDDAKNTLYLQMSSLKSEDTAMYYCTRGGFAYWGQGTLVTVSAEQKLISEEDLNPGGGGGSGGGGSGGGGSGGGGSGSMDIQMTQSPSSLSASVGDRVTITCRASQDIRNYLNWYQQKPGKAPKLLIYYTSRLESGVPSRFSGSGSGTDYTLTISSLQPEDFATYYCQQGNTLPWTFGQGTKVEIKGGGGSGGGGSGGGGSEVQLVESGGGLVQPGGSLRLSCAASGYSFTGYTMNWVRQAPGKGLEWVALINPYKGVSTYNQKFKDRFTISVDKSKNTAYLQMNSLRAEDTAVYYCARSGYYGDSDWYFDVWGQGTLVTVSSTSGGGGSLESGQVLLESNIKVLPTWSTPVQPMALIVLGGVAGLLLFIGLGIFFCVRCRHRRRQAERMSQIKRLLSEKKTCQCPHRFQKTCSPI

SEQ ID NO: 562 - protein, 509 aa, Artificial Sequence
  Description of Artificial Sequence: Synthetic polypeptide
MALPVTALLLPLALLLHAARPQVQLQESGGGLVQPGGSLRLSCAASRSIFGIAFMDWYRQAPGKQREFVAGISHSGATSYADSVKGRFTVSRDNAKNTMYLQMNNLLPEDSAVYYCKADTATNTDWGQGTQVTVSSEQKLISEEDLNPGGGGGSGGGGSGGGGSGGGGSGSMDIQMTQSPSSLSASVGDRVTITCRASQDIRNYLNWYQQKPGKAPKLLIYYTSRLESGVPSRFSGSGSGTDYTLTISSLQPEDFATYYCQQGNTLPWTFGQGTKVEIKGGGGSGGGGSGGGGSEVQLVESGGGLVQPGGSLRLSCAASGYSFTGYTMNWVRQAPGKGLEWVALINPYKGVSTYNQKFKDRFTISVDKSKNTAYLQMNSLRAEDTAVYYCARSGYYGDSDWYFDVWGQGTLVTVSSTSGGGGSLESGQVLLESNIKVLPTWSTPVQPMALIVLGGVAGLLLFIGLGIFFCVRCRHRRRQAERMSQIKRLLSEKKTCQCPHRFQKTCSPI

SEQ ID NO: 563 - protein, 509 aa, Artificial Sequence
  Description of Artificial Sequence: Synthetic polypeptide
MALPVTALLLPLALLLHAARPEVQLVESGGGLVQPGGSLRLSCAASRSIFVIAFMDWYRQAPGKQREFVAGISSSGATSYASSVKGRFTVSRDTAKNTMYLQMNNLLPEDSAVYYCKADTATTTDWGQGTQVTVSSEQKLISEEDLNPGGGGGSGGGGSGGGGSGGGGSGSMDIQMTQSPSSLSASVGDRVTITCRASQDIRNYLNWYQQKPGKAPKLLIYYTSRLESGVPSRFSGSGSGTDYTLTISSLQPEDFATYYCQQGNTLPWTFGQGTKVEIKGGGGSGGGGSGGGGSEVQLVESGGGLVQPGGSLRLSCAASGYSFTGYTMNWVRQAPGKGLEWVALINPYKGVSTYNQKFKDRFTISVDKSKNTAYLQMNSLRAEDTAVYYCARSGYYGDSDWYFDVWGQGTLVTVSSTSGGGGSLESGQVLLESNIKVLPTWSTPVQPMALIVLGGVAGLLLFIGLGIFFCVRCRHRRRQAERMSQIKRLLSEKKTCQCPHRFQKTCSPI

SEQ ID NO: 564 - protein, 514 aa, Artificial Sequence
  Description of Artificial Sequence: Synthetic polypeptide
MALPVTALLLPLALLLHAARPEVQLVESGGGLVQPGGSLRLSCAASGIIFSINTMAWYRQGPGKERDLVAVIKGDGSTSYADSVNGRFTISRDNAKNTVYLRMNGLKPEDTAVYYCNSAGRSYSGVYGAYWGQGTQVTVSSEQKLISEEDLNPGGGGGSGGGGSGGGGSGGGGSGSMDIQMTQSPSSLSASVGDRVTITCRASQDIRNYLNWYQQKPGKAPKLLIYYTSRLESGVPSRFSGSGSGTDYTLTISSLQPEDFATYYCQQGNTLPWTFGQGTKVEIKGGGGSGGGGSGGGGSEVQLVESGGGLVQPGGSLRLSCAASGYSFTGYTMNWVRQAPGKGLEWVALINPYKGVSTYNQKFKDRFTISVDKSKNTAYLQMNSLRAEDTAVYYCARSGYYGDSDWYFDVWGQGTLVTVSSTSGGGGSLESGQVLLESNIKVLPTWSTPVQPMALIVLGGVAGLLLFIGLGIFFCVRCRHRRRQAERMSQIKRLLSEKKTCQCPHRFQKTCSPI

SEQ ID NO: 565 - protein, 514 aa, Artificial Sequence
  Description of Artificial Sequence: Synthetic polypeptide
MALPVTALLLPLALLLHAARPEVQLQESGGGLVQPGGSLKLSCAASGSIFSIGAMRWYRQVPGNERELVAGITNGGNTNYADSVKARFTISRDNAKNTVYLQMNSLKPEDTTVYFCNADVQNSGYVWGNYWGQGTQVTVSSEQKLISEEDLNPGGGGGSGGGGSGGGGSGGGGSGSMDIQMTQSPSSLSASVGDRVTITCRASQDIRNYLNWYQQKPGKAPKLLIYYTSRLESGVPSRFSGSGSGTDYTLTISSLQPEDFATYYCQQGNTLPWTFGQGTKVEIKGGGGSGGGGSGGGGSEVQLVESGGGLVQPGGSLRLSCAASGYSFTGYTMNWVRQAPGKGLEWVALINPYKGVSTYNQKFKDRFTISVDKSKNTAYLQMNSLRAEDTAVYYCARSGYYGDSDWYFDVWGQGTLVTVSSTSGGGGSLESGQVLLESNIKVLPTWSTPVQPMALIVLGGVAGLLLFIGLGIFFCVRCRHRRRQAERMSQIKRLLSEKKTCQCPHRFQKTCSPI

SEQ ID NO: 566 - protein, 509 aa, Artificial Sequence
  Description of Artificial Sequence: Synthetic polypeptide
MALPVTALLLPLALLLHAARPEVQLVESGGGLVQPGGSLRLSCAASRSIFVIAFMDWYRQAPGKQREFVAGISSSGATSYADSVKGRFTVSRDTAKNTMYLQMNNLLPEDSAVYYCKADTATNTDWGQGTQVTVSSEQKLISEEDLNPGGGGGSGGGGSGGGGSGGGGSGSMDIQMTQSPSSLSASVGDRVTITCRASQDIRNYLNWYQQKPGKAPKLLIYYTSRLESGVPSRFSGSGSGTDYTLTISSLQPEDFATYYCQQGNTLPWTFGQGTKVEIKGGGGSGGGGSGGGGSEVQLVESGGGLVQPGGSLRLSCAASGYSFTGYTMNWVRQAPGKGLEWVALINPYKGVSTYNQKFKDRFTISVDKSKNTAYLQMNSLRAEDTAVYYCARSGYYGDSDWYFDVWGQGTLVTVSSTSGGGGSLESGQVLLESNIKVLPTWSTPVQPMALIVLGGVAGLLLFIGLGIFFCVRCRHRRRQAERMSQIKRLLSEKKTCQCPHRFQKTCSPI

SEQ ID NO: 567 - protein, 509 aa, Artificial Sequence
  Description of Artificial Sequence: Synthetic polypeptide
MALPVTALLLPLALLLHAARPQVQLVESGGGLVQPGGSLRLSCATSGIIFHIYTMGWYRGAPGKQRELVARITSGGDTNYADSVKGRFTISRDNVKNTMYLQMNSLKPEDTAVYYCNRFPGATFSWGQGTQVTVSSEQKLISEEDLNPGGGGGSGGGGSGGGGSGGGGSGSMDIQMTQSPSSLSASVGDRVTITCRASQDIRNYLNWYQQKPGKAPKLLIYYTSRLESGVPSRFSGSGSGTDYTLTISSLQPEDFATYYCQQGNTLPWTFGQGTKVEIKGGGGSGGGGSGGGGSEVQLVESGGGLVQPGGSLRLSCAASGYSFTGYTMNWVRQAPGKGLEWVALINPYKGVSTYNQKFKDRFTISVDKSKNTAYLQMNSLRAEDTAVYYCARSGYYGDSDWYFDVWGQGTLVTVSSTSGGGGSLESGQVLLESNIKVLPTWSTPVQPMALIVLGGVAGLLLFIGLGIFFCVRCRHRRRQAERMSQIKRLLSEKKTCQCPHRFQKTCSPI

SEQ ID NO: 568 - protein, 514 aa, Artificial Sequence
  Description of Artificial Sequence: Synthetic polypeptide
MALPVTALLLPLALLLHAARPQLQLVESGGGLVQAGGSLRLSCAVSGNIWVFTVMAWYRQVPGKQRELVAASTNGGSTNYADSVKGRFTISRDNVKNTVYLQMNSLKPEDTAVYYCNRQRTVIGMNPLAPWGQGTQVTVSSEQKLISEEDLNPGGGGGSGGGGSGGGGSGGGGSGSMDIQMTQSPSSLSASVGDRVTITCRASQDIRNYLNWYQQKPGKAPKLLIYYTSRLESGVPSRFSGSGSGTDYTLTISSLQPEDFATYYCQQGNTLPWTFGQGTKVEIKGGGGSGGGGSGGGGSEVQLVESGGGLVQPGGSLRLSCAASGYSFTGYTMNWVRQAPGKGLEWVALINPYKGVSTYNQKFKDRFTISVDKSKNTAYLQMNSLRAEDTAVYYCARSGYYGDSDWYFDVWGQGTLVTVSSTSGGGGSLESGQVLLESNIKVLPTWSTPVQPMALIVLGGVAGLLLFIGLGIFFCVRCRHRRRQAERMSQIKRLLSEKKTCQCPHRFQKTCSPI

SEQ ID NO: 569 - protein, 509 aa, Artificial Sequence
  Description of Artificial Sequence: Synthetic polypeptide
MALPVTALLLPLALLLHAARPQVQLVESGGGLVQPGGSLRLSCAVSRNIASLYRVDWYRQAPGKQRELVAGRTSGGTTTYLDAVEGRFTISRDNVKDTVYLQMNSLTPEDTAVYYCHAHDHWRDSWGQGTQVTVSSEQKLISEEDLNPGGGGGSGGGGSGGGGSGGGGSGSMDIQMTQSPSSLSASVGDRVTITCRASQDIRNYLNWYQQKPGKAPKLLIYYTSRLESGVPSRFSGSGSGTDYTLTISSLQPEDFATYYCQQGNTLPWTFGQGTKVEIKGGGGSGGGGSGGGGSEVQLVESGGGLVQPGGSLRLSCAASGYSFTGYTMNWVRQAPGKGLEWVALINPYKGVSTYNQKFKDRFTISVDKSKNTAYLQMNSLRAEDTAVYYCARSGYYGDSDWYFDVWGQGTLVTVSSTSGGGGSLESGQVLLESNIKVLPTWSTPVQPMALIVLGGVAGLLLFIGLGIFFCVRCRHRRRQAERMSQIKRLLSEKKTCQCPHRFQKTCSPI

SEQ ID NO: 570 - protein, 509 aa, Artificial Sequence
  Description of Artificial Sequence: Synthetic polypeptide
MALPVTALLLPLALLLHAARPEVQLVESGGGLVQPGGSLRLSCAASRNIFSLYRVDWYRQAPGKQRELVAGSTSGGTTTYADAVKGRFTISTDNVKDTVYLQMNSLTPEDTAVYYCHAHDHWRDSWGQGTQVTVSSEQKLISEEDLNPGGGGGSGGGGSGGGGSGGGGSGSMDIQMTQSPSSLSASVGDRVTITCRASQDIRNYLNWYQQKPGKAPKLLIYYTSRLESGVPSRFSGSGSGTDYTLTISSLQPEDFATYYCQQGNTLPWTFGQGTKVEIKGGGGSGGGGSGGGGSEVQLVESGGGLVQPGGSLRLSCAASGYSFTGYTMNWVRQAPGKGLEWVALINPYKGVSTYNQKFKDRFTISVDKSKNTAYLQMNSLRAEDTAVYYCARSGYYGDSDWYFDVWGQGTLVTVSSTSGGGGSLESGQVLLESNIKVLPTWSTPVQPMALIVLGGVAGLLLFIGLGIFFCVRCRHRRRQAERMSQIKRLLSEKKTCQCPHRFQKTCSPI

SEQ ID NO: 571 - protein, 644 aa, Artificial Sequence
  Description of Artificial Sequence: Synthetic polypeptide
MALPVTALLLPLALLLHAARPQVQLVQSGAEVKKPGSSVKVSCKASGGTFSSYAISWVRQAPGQGLEWMGGIIPIFGTANYAQKFQGRVTITADESTSTAYMELSSLRSEDTAVYYCARDILRLSVSSGMDVWGQGTLVTVSSGSTSGSGKPGSGEGSTKGQSVLTQPPSASGTPGQRVTISCSGSSSNIGSNYVYWYQQLPGTAPKLLIYRNNQRPSGVPDRLSGSKSGTSASLAISGLRSEDEADYYCAAWDDSLSAVVFGGGTKLTVLEQKLISEEDLNPGGGGGSGGGGSGGGGSGGGGSGSMDIQMTQSPSSLSASVGDRVTITCRASQDIRNYLNWYQQKPGKAPKLLIYYTSRLESGVPSRFSGSGSGTDYTLTISSLQPEDFATYYCQQGNTLPWTFGQGTKVEIKGGGGSGGGGSGGGGSEVQLVESGGGLVQPGGSLRLSCAASGYSFTGYTMNWVRQAPGKGLEWVALINPYKGVSTYNQKFKDRFTISVDKSKNTAYLQMNSLRAEDTAVYYCARSGYYGDSDWYFDVWGQGTLVTVSSTSGGGGSLESGQVLLESNIKVLPTWSTPVQPMALIVLGGVAGLLLFIGLGIFFCVRCRHRRRQAERMSQIKRLLSEKKTCQCPHRFQKTCSPI

SEQ ID NO: 572 - protein, 644 aa, Artificial Sequence
  Description of Artificial Sequence: Synthetic polypeptide
MALPVTALLLPLALLLHAARPQSVLTQPPSASGTPGQRVTISCSGSSSNIGSNYVYWYQQLPGTAPKLLIYRNNQRPSGVPDRLSGSKSGTSASLAISGLRSEDEADYYCAAWDDSLSAVVFGGGTKLTVLGSTSGSGKPGSGEGSTKGQVQLVQSGAEVKKPGSSVKVSCKASGGTFSSYAISWVRQAPGQGLEWMGGIIPIFGTANYAQKFQGRVTITADESTSTAYMELSSLRSEDTAVYYCARDILRLSVSSGMDVWGQGTLVTVSSEQKLISEEDLNPGGGGGSGGGGSGGGGSGGGGSGSMDIQMTQSPSSLSASVGDRVTITCRASQDIRNYLNWYQQKPGKAPKLLIYYTSRLESGVPSRFSGSGSGTDYTLTISSLQPEDFATYYCQQGNTLPWTFGQGTKVEIKGGGGSGGGGSGGGGSEVQLVESGGGLVQPGGSLRLSCAASGYSFTGYTMNWVRQAPGKGLEWVALINPYKGVSTYNQKFKDRFTISVDKSKNTAYLQMNSLRAEDTAVYYCARSGYYGDSDWYFDVWGQGTLVTVSSTSGGGGSLESGQVLLESNIKVLPTWSTPVQPMALIVLGGVAGLLLFIGLGIFFCVRCRHRRRQAERMSQIKRLLSEKKTCQCPHRFQKTCSPI

SEQ ID NO: 573 - protein, 645 aa, Artificial Sequence
  Description of Artificial Sequence: Synthetic polypeptide
MALPVTALLLPLALLLHAARPQVQLQESGGGVVQPGRSLRLSCAASGFTLSSYGMHWVRQAPGKGLEWVAVISYDGSNKYYADSVKGRFTISRDNSKNTLYLQMNSLRAEDTAVYYCAKSGWRYYYYYGMDVWGQGTLVTVSSGSTSGSGKPGSGEGSTKGQSVLTQPPSVSGAPGQRVTISCTGSSSNIGAGYDVHWYQQLPGTAPKLLIYGNSNRPSGVPDRFSGSKSGTSASLAITGLQAEDEADYYCQSYDSSLSGSVFGGGTKLTVLEQKLISEEDLNPGGGGGSGGGGSGGGGSGGGGSGSMDIQMTQSPSSLSASVGDRVTITCRASQDIRNYLNWYQQKPGKAPKLLIYYTSRLESGVPSRFSGSGSGTDYTLTISSLQPEDFATYYCQQGNTLPWTFGQGTKVEIKGGGGSGGGGSGGGGSEVQLVESGGGLVQPGGSLRLSCAASGYSFTGYTMNWVRQAPGKGLEWVALINPYKGVSTYNQKFKDRFTISVDKSKNTAYLQMNSLRAEDTAVYYCARSGYYGDSDWYFDVWGQGTLVTVSSTSGGGGSLESGQVLLESNIKVLPTWSTPVQPMALIVLGGVAGLLLFIGLGIFFCVRCRHRRRQAERMSQIKRLLSEKKTCQCPHRFQKTCSPI

SEQ ID NO: 574 - protein, 645 aa, Artificial Sequence
  Description of Artificial Sequence: Synthetic polypeptide
MALPVTALLLPLALLLHAARPQSVLTQPPSVSGAPGQRVTISCTGSSSNIGAGYDVHWYQQLPGTAPKLLIYGNSNRPSGVPDRFSGSKSGTSASLAITGLQAEDEADYYCQSYDSSLSGSVFGGGTKLTVLGSTSGSGKPGSGEGSTKGQVQLQESGGGVVQPGRSLRLSCAASGFTLSSYGMHWVRQAPGKGLEWVAVISYDGSNKYYADSVKGRFTISRDNSKNTLYLQMNSLRAEDTAVYYCAKSGWRYYYYYGMDVWGQGTLVTVSSEQKLISEEDLNPGGGGGSGGGGSGGGGSGGGGSGSMDIQMTQSPSSLSASVGDRVTITCRASQDIRNYLNWYQQKPGKAPKLLIYYTSRLESGVPSRFSGSGSGTDYTLTISSLQPEDFATYYCQQGNTLPWTFGQGTKVEIKGGGGSGGGGSGGGGSEVQLVESGGGLVQPGGSLRLSCAASGYSFTGYTMNWVRQAPGKGLEWVALINPYKGVSTYNQKFKDRFTISVDKSKNTAYLQMNSLRAEDTAVYYCARSGYYGDSDWYFDVWGQGTLVTVSSTSGGGGSLESGQVLLESNIKVLPTWSTPVQPMALIVLGGVAGLLLFIGLGIFFCVRCRHRRRQAERMSQIKRLLSEKKTCQCPHRFQKTCSPI

SEQ ID NO: 575 - protein, 639 aa, Artificial Sequence
  Description of Artificial Sequence: Synthetic polypeptide
MALPVTALLLPLALLLHAARPEVQLLESGGGLVQPGGSLRLSCAASGFTFSSYWMSWVRQAPGKGLEWVANIKQDGSEKYYVDSVKGRFTISRDNAKNSLYLQMNSLRAEDTAVYYCARPAGQLLYGMDVWGQGTLVTVSSGSTSGSGKPGSGEGSTKGSYVLTQPPSVSVSPGQTARITCSGDALPKQYAYWYQQKPGQAPVLVIYKDSERPSGIPERFSGSSSGTTVTLTISGVQAEDEADYYCQSADSSGTWVFGGGTKLTVLEQKLISEEDLNPGGGGGSGGGGSGGGGSGGGGSGSMDIQMTQSPSSLSASVGDRVTITCRASQDIRNYLNWYQQKPGKAPKLLIYYTSRLESGVPSRFSGSGSGTDYTLTISSLQPEDFATYYCQQGNTLPWTFGQGTKVEIKGGGGSGGGGSGGGGSEVQLVESGGGLVQPGGSLRLSCAASGYSFTGYTMNWVRQAPGKGLEWVALINPYKGVSTYNQKFKDRFTISVDKSKNTAYLQMNSLRAEDTAVYYCARSGYYGDSDWYFDVWGQGTLVTVSSTSGGGGSLESGQVLLESNIKVLPTWSTPVQPMALIVLGGVAGLLLFIGLGIFFCVRCRHRRRQAERMSQIKRLLSEKKTCQCPHRFQKTCSPI

SEQ ID NO: 576 - protein, 639 aa, Artificial Sequence
  Description of Artificial Sequence: Synthetic polypeptide
MALPVTALLLPLALLLHAARPSYVLTQPPSVSVSPGQTARITCSGDALPKQYAYWYQQKPGQAPVLVIYKDSERPSGIPERFSGSSSGTTVTLTISGVQAEDEADYYCQSADSSGTWVFGGGTKLTVLGSTSGSGKPGSGEGSTKGEVQLLESGGGLVQPGGSLRLSCAASGFTFSSYWMSWVRQAPGKGLEWVANIKQDGSEKYYVDSVKGRFTISRDNAKNSLYLQMNSLRAEDTAVYYCARPAGQLLYGMDVWGQGTLVTVSSEQKLISEEDLNPGGGGGSGGGGSGGGGSGGGGSGSMDIQMTQSPSSLSASVGDRVTITCRASQDIRNYLNWYQQKPGKAPKLLIYYTSRLESGVPSRFSGSGSGTDYTLTISSLQPEDFATYYCQQGNTLPWTFGQGTKVEIKGGGGSGGGGSGGGGSEVQLVESGGGLVQPGGSLRLSCAASGYSFTGYTMNWVRQAPGKGLEWVALINPYKGVSTYNQKFKDRFTISVDKSKNTAYLQMNSLRAEDTAVYYCARSGYYGDSDWYFDVWGQGTLVTVSSTSGGGGSLESGQVLLESNIKVLPTWSTPVQPMALIVLGGVAGLLLFIGLGIFFCVRCRHRRRQAERMSQIKRLLSEKKTCQCPHRFQKTCSPI

SEQ ID NO: 577 - protein, 644 aa, Artificial Sequence
  Description of Artificial Sequence: Synthetic polypeptide
MALPVTALLLPLALLLHAARPEVQLLESGGGVVQPGRSLRLSCAASGFTFSSYGMHWVRQAPGKGLEWVAVISYDGSNKYYADSVKGRFTISRDNSKNTLYLQMNSLRAEDTAVYYCAKDAADMGAFDYWGQGTLVTVSSGSTSGSGKPGSGEGSTKGDIQMTQSPDSLAVSLGERATMNCKSSQSVLYSSNNKNYLAWYQQKPGQPPKLLIYWASARESGVPDRFSGSGSGTDFTLTISSLQAEDVAVYYCQQYYSTPLTFGQGTKVEIKEQKLISEEDLNPGGGGGSGGGGSGGGGSGGGGSGSMDIQMTQSPSSLSASVGDRVTITCRASQDIRNYLNWYQQKPGKAPKLLIYYTSRLESGVPSRFSGSGSGTDYTLTISSLQPEDFATYYCQQGNTLPWTFGQGTKVEIKGGGGSGGGGSGGGGSEVQLVESGGGLVQPGGSLRLSCAASGYSFTGYTMNWVRQAPGKGLEWVALINPYKGVSTYNQKFKDRFTISVDKSKNTAYLQMNSLRAEDTAVYYCARSGYYGDSDWYFDVWGQGTLVTVSSTSGGGGSLESGQVLLESNIKVLPTWSTPVQPMALIVLGGVAGLLLFIGLGIFFCVRCRHRRRQAERMSQIKRLLSEKKTCQCPHRFQKTCSPI

SEQ ID NO: 578 - protein, 644 aa, Artificial Sequence
  Description of Artificial Sequence: Synthetic polypeptide
MALPVTALLLPLALLLHAARPDIQMTQSPDSLAVSLGERATMNCKSSQSVLYSSNNKNYLAWYQQKPGQPPKLLIYWASARESGVPDRFSGSGSGTDFTLTISSLQAEDVAVYYCQQYYSTPLTFGQGTKVEIKGSTSGSGKPGSGEGSTKGEVQLLESGGGVVQPGRSLRLSCAASGFTFSSYGMHWVRQAPGKGLEWVAVISYDGSNKYYADSVKGRFTISRDNSKNTLYLQMNSLRAEDTAVYYCAKDAADMGAFDYWGQGTLVTVSSEQKLISEEDLNPGGGGGSGGGGSGGGGSGGGGSGSMDIQMTQSPSSLSASVGDRVTITCRASQDIRNYLNWYQQKPGKAPKLLIYYTSRLESGVPSRFSGSGSGTDYTLTISSLQPEDFATYYCQQGNTLPWTFGQGTKVEIKGGGGSGGGGSGGGGSEVQLVESGGGLVQPGGSLRLSCAASGYSFTGYTMNWVRQAPGKGLEWVALINPYKGVSTYNQKFKDRFTISVDKSKNTAYLQMNSLRAEDTAVYYCARSGYYGDSDWYFDVWGQGTLVTVSSTSGGGGSLESGQVLLESNIKVLPTWSTPVQPMALIVLGGVAGLLLFIGLGIFFCVRCRHRRRQAERMSQIKRLLSEKKTCQCPHRFQKTCSPI

SEQ ID NO: 579 - protein, 644 aa, Artificial Sequence
  Description of Artificial Sequence: Synthetic polypeptide
MALPVTALLLPLALLLHAARPEVQLLESGGGLVKPGGSLRLSCAASGFTFSSYSMNWVRQAPGKGLEWVSAISGSGGSTYYADSVKGRFTISRDNSKNTLYLQMNSLRAEDTAVYYCARARGYSYGSDAFDIWGQGTMVTVSSGSTSGSGKPGSGEGSTKGQSVLTQPPSASGTPGQRVTISCSGSSSNIGSNYVYWYQQLPGTAPKLLIYRNNQRPSGVPDRFSGSKSGTSASLAISGLRSEDEADYYCAAWDDSLSGVVFGGGTKLTVLEQKLISEEDLNPGGGGGSGGGGSGGGGSGGGGSGSMDIQMTQSPSSLSASVGDRVTITCRASQDIRNYLNWYQQKPGKAPKLLIYYTSRLESGVPSRFSGSGSGTDYTLTISSLQPEDFATYYCQQGNTLPWTFGQGTKVEIKGGGGSGGGGSGGGGSEVQLVESGGGLVQPGGSLRLSCAASGYSFTGYTMNWVRQAPGKGLEWVALINPYKGVSTYNQKFKDRFTISVDKSKNTAYLQMNSLRAEDTAVYYCARSGYYGDSDWYFDVWGQGTLVTVSSTSGGGGSLESGQVLLESNIKVLPTWSTPVQPMALIVLGGVAGLLLFIGLGIFFCVRCRHRRRQAERMSQIKRLLSEKKTCQCPHRFQKTCSPI

SEQ ID NO: 580 - protein, 644 aa, Artificial Sequence
  Description of Artificial Sequence: Synthetic polypeptide
MALPVTALLLPLALLLHAARPQSVLTQPPSASGTPGQRVTISCSGSSSNIGSNYVYWYQQLPGTAPKLLIYRNNQRPSGVPDRFSGSKSGTSASLAISGLRSEDEADYYCAAWDDSLSGVVFGGGTKLTVLGSTSGSGKPGSGEGSTKGEVQLLESGGGLVKPGGSLRLSCAASGFTFSSYSMNWVRQAPGKGLEWVSAISGSGGSTYYADSVKGRFTISRDNSKNTLYLQMNSLRAEDTAVYYCARARGYSYGSDAFDIWGQGTMVTVSSEQKLISEEDLNPGGGGGSGGGGSGGGGSGGGGSGSMDIQMTQSPSSLSASVGDRVTITCRASQDIRNYLNWYQQKPGKAPKLLIYYTSRLESGVPSRFSGSGSGTDYTLTISSLQPEDFATYYCQQGNTLPWTFGQGTKVEIKGGGGSGGGGSGGGGSEVQLVESGGGLVQPGGSLRLSCAASGYSFTGYTMNWVRQAPGKGLEWVALINPYKGVSTYNQKFKDRFTISVDKSKNTAYLQMNSLRAEDTAVYYCARSGYYGDSDWYFDVWGQGTLVTVSSTSGGGGSLESGQVLLESNIKVLPTWSTPVQPMALIVLGGVAGLLLFIGLGIFFCVRCRHRRRQAERMSQIKRLLSEKKTCQCPHRFQKTCSPI

SEQ ID NO: 581 - protein, 648 aa, Artificial Sequence
  Description of Artificial Sequence: Synthetic polypeptide
MALPVTALLLPLALLLHAARPEVQLVQSGAEVKKPGSSVKVSCKASGGTFSSYAISWVRQAPGQGLEWMGGIIPIFGTANYAQKFQGRVTITADESTSTAYMELSSLRSEDTAVYYCARDRGRRYCSGGSCPNAFDIWGQGTMVTVSSGSTSGSGKPGSGEGSTKGEIVLTQSPATLSVSPGERATLSCRASQSVSSNLAWYQQKPGQAPRLLIYGASTRATGIPARFSGSGSGTEFTLTISSLQSEDFAVYYCQQYNNWPPALTFGGGTKVEIKEQKLISEEDLNPGGGGGSGGGGSGGGGSGGGGSGSMDIQMTQSPSSLSASVGDRVTITCRASQDIRNYLNWYQQKPGKAPKLLIYYTSRLESGVPSRFSGSGSGTDYTLTISSLQPEDFATYYCQQGNTLPWTFGQGTKVEIKGGGGSGGGGSGGGGSEVQLVESGGGLVQPGGSLRLSCAASGYSFTGYTMNWVRQAPGKGLEWVALINPYKGVSTYNQKFKDRFTISVDKSKNTAYLQMNSLRAEDTAVYYCARSGYYGDSDWYFDVWGQGTLVTVSSTSGGGGSLESGQVLLESNIKVLPTWSTPVQPMALIVLGGVAGLLLFIGLGIFFCVRCRHRRRQAERMSQIKRLLSEKKTCQCPHRFQKTCSPI

SEQ ID NO: 582 - protein, 648 aa, Artificial Sequence
  Description of Artificial Sequence: Synthetic polypeptide
MALPVTALLLPLALLLHAARPEIVLTQSPATLSVSPGERATLSCRASQSVSSNLAWYQQKPGQAPRLLIYGASTRATGIPARFSGSGSGTEFTLTISSLQSEDFAVYYCQQYNNWPPALTFGGGTKVEIKGSTSGSGKPGSGEGSTKGEVQLVQSGAEVKKPGSSVKVSCKASGGTFSSYAISWVRQAPGQGLEWMGGIIPIFGTANYAQKFQGRVTITADESTSTAYMELSSLRSEDTAVYYCARDRGRRYCSGGSCPNAFDIWGQGTMVTVSSEQKLISEEDLNPGGGGGSGGGGSGGGGSGGGGSGSMDIQMTQSPSSLSASVGDRVTITCRASQDIRNYLNWYQQKPGKAPKLLIYYTSRLESGVPSRFSGSGSGTDYTLTISSLQPEDFATYYCQQGNTLPWTFGQGTKVEIKGGGGSGGGGSGGGGSEVQLVESGGGLVQPGGSLRLSCAASGYSFTGYTMNWVRQAPGKGLEWVALINPYKGVSTYNQKFKDRFTISVDKSKNTAYLQMNSLRAEDTAVYYCARSGYYGDSDWYFDVWGQGTLVTVSSTSGGGGSLESGQVLLESNIKVLPTWSTPVQPMALIVLGGVAGLLLFIGLGIFFCVRCRHRRRQAERMSQIKRLLSEKKTCQCPHRFQKTCSPI

SEQ ID NO: 583 - protein, 648 aa, Artificial Sequence
  Description of Artificial Sequence: Synthetic polypeptide
MALPVTALLLPLALLLHAARPQVQLVQSGAEVKKPGSSVKVSCKASGGTFSSYAISWVRQAPGQGLEWMGGIIPIFGTANYAQKFQGRVTITADESTSTAYMELSSLRSEDTAVYYCARGGYVWGSYRQNSNWFDPWGQGTLVTVSSGSTSGSGKPGSGEGSTKGSYVLTQPPSASGTPGQRVTISCSGSSSNIGSNYVYWYQQLPGTAPKLLIYRNNQRPSGVPDRFSGSKSGTSASLAISGLRSEDEADYYCAAWDDSLSGWVFGGGTKLTVLEQKLISEEDLNPGGGGGSGGGGSGGGGSGGGGSGSMDIQMTQSPSSLSASVGDRVTITCRASQDIRNYLNWYQQKPGKAPKLLIYYTSRLESGVPSRFSGSGSGTDYTLTISSLQPEDFATYYCQQGNTLPWTFGQGTKVEIKGGGGSGGGGSGGGGSEVQLVESGGGLVQPGGSLRLSCAASGYSFTGYTMNWVRQAPGKGLEWVALINPYKGVSTYNQKFKDRFTISVDKSKNTAYLQMNSLRAEDTAVYYCARSGYYGDSDWYFDVWGQGTLVTVSSTSGGGGSLESGQVLLESNIKVLPTWSTPVQPMALIVLGGVAGLLLFIGLGIFFCVRCRHRRRQAERMSQIKRLLSEKKTCQCPHRFQKTCSPI

SEQ ID NO: 584 - protein, 648 aa, Artificial Sequence
  Description of Artificial Sequence: Synthetic polypeptide
MALPVTALLLPLALLLHAARPSYVLTQPPSASGTPGQRVTISCSGSSSNIGSNYVYWYQQLPGTAPKLLIYRNNQRPSGVPDRFSGSKSGTSASLAISGLRSEDEADYYCAAWDDSLSGWVFGGGTKLTVLGSTSGSGKPGSGEGSTKGQVQLVQSGAEVKKPGSSVKVSCKASGGTFSSYAISWVRQAPGQGLEWMGGIIPIFGTANYAQKFQGRVTITADESTSTAYMELSSLRSEDTAVYYCARGGYVWGSYRQNSNWFDPWGQGTLVTVSSEQKLISEEDLNPGGGGGSGGGGSGGGGSGGGGSGSMDIQMTQSPSSLSASVGDRVTITCRASQDIRNYLNWYQQKPGKAPKLLIYYTSRLESGVPSRFSGSGSGTDYTLTISSLQPEDFATYYCQQGNTLPWTFGQGTKVEIKGGGGSGGGGSGGGGSEVQLVESGGGLVQPGGSLRLSCAASGYSFTGYTMNWVRQAPGKGLEWVALINPYKGVSTYNQKFKDRFTISVDKSKNTAYLQMNSLRAEDTAVYYCARSGYYGDSDWYFDVWGQGTLVTVSSTSGGGGSLESGQVLLESNIKVLPTWSTPVQPMALIVLGGVAGLLLFIGLGIFFCVRCRHRRRQAERMSQIKRLLSEKKTCQCPHRFQKTCSPI

SEQ ID NO: 585 - protein, 647 aa, Artificial Sequence
  Description of Artificial Sequence: Synthetic polypeptide
MALPVTALLLPLALLLHAARPQVQLVESGAEVKKPGSSVKVSCKASGGTFSSYAISWVRQAPGQGLEWMGGIIPIFGTANYAQKFQGRVTITADKSTSTAYMELSSLRSEDTAVYYCARTHLPYSYGLGGFDYWGQGTLVTVSSGSTSGSGKPGSGEGSTKGQSVLTQPPSVSGAPGQRVTISCTGSSSNIGAGYDVHWYQQLPGTAPKLLIYGNSNRPSGVPDRFSGSKSGTSASLAITGLQAEDEADYYCQSYDSSLSGPVVFGGGTKVTVLEQKLISEEDLNPGGGGGSGGGGSGGGGSGGGGSGSMDIQMTQSPSSLSASVGDRVTITCRASQDIRNYLNWYQQKPGKAPKLLIYYTSRLESGVPSRFSGSGSGTDYTLTISSLQPEDFATYYCQQGNTLPWTFGQGTKVEIKGGGGSGGGGSGGGGSEVQLVESGGGLVQPGGSLRLSCAASGYSFTGYTMNWVRQAPGKGLEWVALINPYKGVSTYNQKFKDRFTISVDKSKNTAYLQMNSLRAEDTAVYYCARSGYYGDSDWYFDVWGQGTLVTVSSTSGGGGSLESGQVLLESNIKVLPTWSTPVQPMALIVLGGVAGLLLFIGLGIFFCVRCRHRRRQAERMSQIKRLLSEKKTCQCPHRFQKTCSPI

SEQ ID NO: 586 - protein, 647 aa, Artificial Sequence
  Description of Artificial Sequence: Synthetic polypeptide
MALPVTALLLPLALLLHAARPQSVLTQPPSVSGAPGQRVTISCTGSSSNIGAGYDVHWYQQLPGTAPKLLIYGNSNRPSGVPDRFSGSKSGTSASLAITGLQAEDEADYYCQSYDSSLSGPVVFGGGTKVTVLGSTSGSGKPGSGEGSTKGQVQLVESGAEVKKPGSSVKVSCKASGGTFSSYAISWVRQAPGQGLEWMGGIIPIFGTANYAQKFQGRVTITADKSTSTAYMELSSLRSEDTAVYYCARTHLPYSYGLGGFDYWGQGTLVTVSSEQKLISEEDLNPGGGGGSGGGGSGGGGSGGGGSGSMDIQMTQSPSSLSASVGDRVTITCRASQDIRNYLNWYQQKPGKAPKLLIYYTSRLESGVPSRFSGSGSGTDYTLTISSLQPEDFATYYCQQGNTLPWTFGQGTKVEIKGGGGSGGGGSGGGGSEVQLVESGGGLVQPGGSLRLSCAASGYSFTGYTMNWVRQAPGKGLEWVALINPYKGVSTYNQKFKDRFTISVDKSKNTAYLQMNSLRAEDTAVYYCARSGYYGDSDWYFDVWGQGTLVTVSSTSGGGGSLESGQVLLESNIKVLPTWSTPVQPMALIVLGGVAGLLLFIGLGIFFCVRCRHRRRQAERMSQIKRLLSEKKTCQCPHRFQKTCSPI

SEQ ID NO: 587 - protein, 649 aa, Artificial Sequence
  Description of Artificial Sequence: Synthetic polypeptide
MALPVTALLLPLALLLHAARPQVQLVQSGAEVKKPGASVKVSCKASGYTFTSYGISWVRQAPGQGLEWMGWISAYNGNTNYAQKLQGRVTMTTDTSTSTAYMELRSLRSDDTAVYYCARDIIRYCSSTSCYRGIDYWGQGTLVTVSSGSTSGSGKPGSGEGSTKGQSALTQPASVSGSPGQSITISCTGTSSDVGGYNYVSWYQQHPGKAPKLMIYDVSNRPSGVSNRFSGSKSGNTASLTISGLQAEDEADYYCSSYTSSSPHVVSGGGTKLTVLEQKLISEEDLNPGGGGGSGGGGSGGGGSGGGGSGSMDIQMTQSPSSLSASVGDRVTITCRASQDIRNYLNWYQQKPGKAPKLLIYYTSRLESGVPSRFSGSGSGTDYTLTISSLQPEDFATYYCQQGNTLPWTFGQGTKVEIKGGGGSGGGGSGGGGSEVQLVESGGGLVQPGGSLRLSCAASGYSFTGYTMNWVRQAPGKGLEWVALINPYKGVSTYNQKFKDRFTISVDKSKNTAYLQMNSLRAEDTAVYYCARSGYYGDSDWYFDVWGQGTLVTVSSTSGGGGSLESGQVLLESNIKVLPTWSTPVQPMALIVLGGVAGLLLFIGLGIFFCVRCRHRRRQAERMSQIKRLLSEKKTCQCPHRFQKTCSPI

SEQ ID NO: 588 - protein, 649 aa, Artificial Sequence
  Description of Artificial Sequence: Synthetic polypeptide
MALPVTALLLPLALLLHAARPQSALTQPASVSGSPGQSITISCTGTSSDVGGYNYVSWYQQHPGKAPKLMIYDVSNRPSGVSNRFSGSKSGNTASLTISGLQAEDEADYYCSSYTSSSPHVVSGGGTKLTVLGSTSGSGKPGSGEGSTKGQVQLVQSGAEVKKPGASVKVSCKASGYTFTSYGISWVRQAPGQGLEWMGWISAYNGNTNYAQKLQGRVTMTTDTSTSTAYMELRSLRSDDTAVYYCARDIIRYCSSTSCYRGIDYWGQGTLVTVSSEQKLISEEDLNPGGGGGSGGGGSGGGGSGGGGSGSMDIQMTQSPSSLSASVGDRVTITCRASQDIRNYLNWYQQKPGKAPKLLIYYTSRLESGVPSRFSGSGSGTDYTLTISSLQPEDFATYYCQQGNTLPWTFGQGTKVEIKGGGGSGGGGSGGGGSEVQLVESGGGLVQPGGSLRLSCAASGYSFTGYTMNWVRQAPGKGLEWVALINPYKGVSTYNQKFKDRFTISVDKSKNTAYLQMNSLRAEDTAVYYCARSGYYGDSDWYFDVWGQGTLVTVSSTSGGGGSLESGQVLLESNIKVLPTWSTPVQPMALIVLGGVAGLLLFIGLGIFFCVRCRHRRRQAERMSQIKRLLSEKKTCQCPHRFQKTCSPI

SEQ ID NO: 589 - protein, 644 aa, Artificial Sequence
  Description of Artificial Sequence: Synthetic polypeptide
MALPVTALLLPLALLLHAARPQVQLVESGAEVKKPGSSVKVSCKASGGTFSSYAISWVRQAPGQGLEWMGGIIPIFGTANYAQKFQGRVTITADESTSTAYMELSSLRSEDTAVYYCARPLYAPRFGYGMDVWGQGTLVTVSSGSTSGSGKPGSGEGSTKGQSVLTQPPSASGTPGQRVTISCSGSSSNIGSNYVYWYQQLPGTAPKLLIYRNNQRPSGVPDRFSGSKSGTSASLAISGLRSEDEADYYCAAWDDSLSGWVFGGGTQLTVLEQKLISEEDLNPGGGGGSGGGGSGGGGSGGGGSGSMDIQMTQSPSSLSASVGDRVTITCRASQDIRNYLNWYQQKPGKAPKLLIYYTSRLESGVPSRFSGSGSGTDYTLTISSLQPEDFATYYCQQGNTLPWTFGQGTKVEIKGGGGSGGGGSGGGGSEVQLVESGGGLVQPGGSLRLSCAASGYSFTGYTMNWVRQAPGKGLEWVALINPYKGVSTYNQKFKDRFTISVDKSKNTAYLQMNSLRAEDTAVYYCARSGYYGDSDWYFDVWGQGTLVTVSSTSGGGGSLESGQVLLESNIKVLPTWSTPVQPMALIVLGGVAGLLLFIGLGIFFCVRCRHRRRQAERMSQIKRLLSEKKTCQCPHRFQKTCSPI

SEQ ID NO: 590 - protein, 644 aa, Artificial Sequence
  Description of Artificial Sequence: Synthetic polypeptide
MALPVTALLLPLALLLHAARPQSVLTQPPSASGTPGQRVTISCSGSSSNIGSNYVYWYQQLPGTAPKLLIYRNNQRPSGVPDRFSGSKSGTSASLAISGLRSEDEADYYCAAWDDSLSGWVFGGGTQLTVLGSTSGSGKPGSGEGSTKGQVQLVESGAEVKKPGSSVKVSCKASGGTFSSYAISWVRQAPGQGLEWMGGIIPIFGTANYAQKFQGRVTITADESTSTAYMELSSLRSEDTAVYYCARPLYAPRFGYGMDVWGQGTLVTVSSEQKLISEEDLNPGGGGGSGGGGSGGGGSGGGGSGSMDIQMTQSPSSLSASVGDRVTITCRASQDIRNYLNWYQQKPGKAPKLLIYYTSRLESGVPSRFSGSGSGTDYTLTISSLQPEDFATYYCQQGNTLPWTFGQGTKVEIKGGGGSGGGGSGGGGSEVQLVESGGGLVQPGGSLRLSCAASGYSFTGYTMNWVRQAPGKGLEWVALINPYKGVSTYNQKFKDRFTISVDKSKNTAYLQMNSLRAEDTAVYYCARSGYYGDSDWYFDVWGQGTLVTVSSTSGGGGSLESGQVLLESNIKVLPTWSTPVQPMALIVLGGVAGLLLFIGLGIFFCVRCRHRRRQAERMSQIKRLLSEKKTCQCPHRFQKTCSPI

SEQ ID NO: 591 - DNA, 1935 bp, Artificial Sequence
  Description of Artificial Sequence: Synthetic polynucleotide
atggctctgcctgtgacagctctgttgctgcctctggctctgctgctgcatgctgctagacctcaggtgcagctggtgcagtctggggctgaggtgaagaagcctgggtcctcggtgaaggtctcctgcaaggcttctggaggcaccttcagcagctatgctatcagctgggtgcgacaggcccctggacaagggcttgagtggatgggagggatcatccctatctttggtacagcaaactacgcacagaagttccagggcagagtcacgattaccgcggacgaatccacgagcacagcctacatggagctgagcagcctgaggagcgaggacacggccgtgtattactgtgcgagagacatattacgattgagcgtgtcctcgggtatggacgtctggggccaagggaccctggtcaccgtgtcctcagggtcaacctctggtagcggtaagcctggctccggcgaaggctccacaaagggtcagtctgtgttgacgcagccgccctcagcgtctgggacccccgggcagagggtcaccatctcttgttctggaggcagctccaacatcggaagtaattatgtatactggtaccagcagctcccaggaacggcccccaaactcctcatctataggaataatcagcggccctcaggggtccctgaccgattctctggctccaagtctggcacctcagcctccctggccatcagtgggctccggtccgaggatgaggctgattattactgtgcagcatgggatgacagcctgagtggtcatgtggtattcggcggagggaccaagctgaccgtcctagagcagaaactgatcagcgaggaagatctgaatcctggcggaggcggaggaagtggtggcggaggttctggtggcggtggatcaggcggtggcggatctggatctatggatatccagatgacccagtccccgagctccctgtccgcctctgtgggcgatagggtcaccatcacctgccgtgccagtcaggacatccgtaattatctgaactggtatcaacagaaaccaggaaaagctccgaaactactgatttactatacctcccgcctggagtctggagtcccttctcgcttctctggttctggttctgggacggattacactctgaccatcagcagtctgcaaccggaagacttcgcaacttattactgtcagcaaggtaatactctgccgtggacgttcggacagggcaccaaggtggagatcaaaggcggcggcggaagtggaggaggaggctcaggcggaggagggagcgaggttcagctggtggagtctggcggtggcctggtgcagccagggggctcactccgtttgtcctgtgcagcttctggctactcctttaccggctacactatgaactgggtgcgtcaggccccaggtaagggcctggaatgggttgcactgattaatcctaccaaaggtgttagtacctacaaccagaagttcaaggaccgtttcactataagcgtagataaatccaaaaacacagcctacctgcaaatgaacagcctgcgtgctgaggacactgccgtctattattgtgctagaagcggatactacggcgatagtgactggtattttgacgtgtggggtcaaggaaccctggtcaccgtctcctcgacatctggcggcggaggatctctggaatctggacaggtgctgctggaaagcaacatcaaggtgctgcccacctggtctaccccagttcagcctatggctctgattgtgcttggcggagttgccggcctgctgctctttatcggcctgggcatcttcttttgcgtgcggtgcagacatcggcggagacaggctgagagaatgagccagatcaagcggctgctgagcgagaagaaaacctgtcagtgccctcaccggttccagaaaacatgcagccccatc

SEQ ID NO: 592 - DNA, 1932 bp, Artificial Sequence
  Description of Artificial Sequence: Synthetic polynucleotide
atggctctgcctgtgacagctctgttgctgcctctggctctgctgctgcatgctgctagacctcaggtgcagctggtgcagtctggggctgaggtgaagaagcctgggtcctcggtgaaggtctcctgcaaggcttctggaggcaccttcagcagctatgctatcagctgggtgcgacaggcccctggacaagggcttgagtggatgggagggatcatccctatctttggtacagcaaactacgcacagaagttccagggcagagtcacgattaccgcggacgaatccacgagcacagcctacatggagctgagcagcctgaggagcgaggacacggccgtgtattactgtgcgagagacatattacgattgagcgtgtcctcgggtatggacgtctggggccaagggaccctggtcaccgtgtcctcagggtcaacctctggtagcggtaagcctggctccggcgaaggctccacaaagggtcagtctgtgctgactcagccaccctcagcgtctgggacccccgggcagagggtcaccatctcttgttctggaagcagctccaacatcggaagtaattatgtatactggtaccagcagctcccaggaacggcccccaaactcctcatctataggaataatcagcggccctcaggggtccctgaccgactctctggctccaagtctggcacctcagcctccctggccatcagtgggctccggtccgaggatgaggctgattattactgtgcagcatgggatgacagcctgagtgctgtggtattcggcggagggaccaagctgaccgtcctagagcagaaactgatcagcgaggaagatctgaatcctggcggaggcggaggaagtggtggcggaggttctggtggcggtggatcaggcggtggcggatctggatctatggatatccagatgacccagtccccgagctccctgtccgcctctgtgggcgatagggtcaccatcacctgccgtgccagtcaggacatccgtaattatctgaactggtatcaacagaaaccaggaaaagctccgaaactactgatttactatacctcccgcctggagtctggagtcccttctcgcttctctggttctggttctgggacggattacactctgaccatcagcagtctgcaaccggaagacttcgcaacttattactgtcagcaaggtaatactctgccgtggacgttcggacagggcaccaaggtggagatcaaaggcggcggcggaagtggaggaggaggctcaggcggaggagggagcgaggttcagctggtggagtctggcggtggcctggtgcagccagggggctcactccgtttgtcctgtgcagcttctggctactcctttaccggctacactatgaactgggtgcgtcaggccccaggtaagggcctggaatgggttgcactgattaatcctaccaaaggtgttagtacctacaaccagaagttcaaggaccgtttcactataagcgtagataaatccaaaaacacagcctacctgcaaatgaacagcctgcgtgctgaggacactgccgtctattattgtgctagaagcggatactacggcgatagtgactggtattttgacgtgtggggtcaaggaaccctggtcaccgtctcctcgacatctggcggcggaggatctctggaatctggacaggtgctgctggaaagcaacatcaaggtgctgcccacctggtctaccccagttcagcctatggctctgattgtgcttggcggagttgccggcctgctgctctttatcggcctgggcatcttcttttgcgtgcggtgcagacatcggcggagacaggctgagagaatgagccagatcaagcggctgctgagcgagaagaaaacctgtcagtgccctcaccggttccagaaaacatgcagccccatc

SEQ ID NO: 593 - DNA, 1935 bp, Artificial Sequence
  Description of Artificial Sequence: Synthetic polynucleotide
atggctctgcctgtgacagctctgttgctgcctctggctctgctgctgcatgctgctagacctcaggtgcagctgcaggagtcggggggaggcgtggtccagcctgggaggtccctgagactctcctgtgcagcctctggattcaccctcagtagctatggcatgcactgggtccgccaggctccaggcaaggggctggagtgggtggcagttatatcatatgatggaagtaataaatactatgcagactccgtgaagggccgattcaccatctccagagacaattccaagaacacgctgtatctgcaaatgaacagcctgagagctgaggacacggctgtgtattactgtgcgaagagcggctggagatattactactactacggtatggacgtctggggccaagggaccctggtcaccgtgtcctcagggtcaacctctggtagcggtaagcctggctccggcgaaggctccacaaagggtcagtctgtgttgacgcagccgccctcagtgtctggggccccagggcagagggtcaccatctcctgcactgggagcagctccaacatcggggcaggttatgatgtacactggtaccagcagcttccaggaacagcccccaaactcctcatctatggtaacagcaatcggccctcaggggtccctgaccgattctctggctccaagtctggcacctcagcctccctggccatcactgggctccaggctgaggatgaggctgattattactgccagtcctatgacagcagcctgagtggttcggtattcggcggagggaccaagctgaccgtcctagagcagaaactgatcagcgaggaagatctgaatcctggcggaggcggaggaagtggtggcggaggttctggtggcggtggatcaggcggtggcggatctggatctatggatatccagatgacccagtccccgagctccctgtccgcctctgtgggcgatagggtcaccatcacctgccgtgccagtcaggacatccgtaattatctgaactggtatcaacagaaaccaggaaaagctccgaaactactgatttactatacctcccgcctggagtctggagtcccttctcgcttctctggttctggttctgggacggattacactctgaccatcagcagtctgcaaccggaagacttcgcaacttattactgtcagcaaggtaatactctgccgtggacgttcggacagggcaccaaggtggagatcaaaggcggcggcggaagtggaggaggaggctcaggcggaggagggagcgaggttcagctggtggagtctggcggtggcctggtgcagccagggggctcactccgtttgtcctgtgcagcttctggctactcctttaccggctacactatgaactgggtgcgtcaggccccaggtaagggcctggaatgggttgcactgattaatcctaccaaaggtgttagtacctacaaccagaagttcaaggaccgtttcactataagcgtagataaatccaaaaacacagcctacctgcaaatgaacagcctgcgtgctgaggacactgccgtctattattgtgctagaagcggatactacggcgatagtgactggtattttgacgtgtggggtcaaggaaccctggtcaccgtctcctcgacatctggcggcggaggatctctggaatctggacaggtgctgctggaaagcaacatcaaggtgctgcccacctggtctaccccagttcagcctatggctctgattgtgcttggcggagttgccggcctgctgctctttatcggcctgggcatcttcttttgcgtgcggtgcagacatcggcggagacaggctgagagaatgagccagatcaagcggctgctgagcgagaagaaaacctgtcagtgccctcaccggttccagaaaacatgcagccccatc

SEQ ID NO: 594 - DNA, 1938 bp, Artificial Sequence
  Description of Artificial Sequence: Synthetic polynucleotide
atggctctgcctgtgacagctctgttgctgcctctggctctgctgctgcatgctgctagacctcaggtgcagctggtgcagtctggggctgaggtgaagaagcctgggtcctcggtgaaggtctcctgcaaggcttctggaggcaccttcagcagctatgctatcagctgggtgcgacaggcccctggacaagggcttgagtggatgggagggatcatccctatctttggtacagcaaactacgcacagaagttccagggcagagtcacgattaccgcggacgaatccacgagcacagcctacatggagctgagcagcctgaggagcgaggacacggccgtgtattactgtgcgagagacatattacgattgagcgtgtcctcgggtatggacgtctggggccaagggacaatggtcaccgtgtcttcagggtcaacctctggtagcggtaagcctggctccggcgaaggctccacaaagggtcagtctgtgctgactcagccaccctcagcgtctgggacccccgggcagagggtcaccatctcttgttctggaagcagctccaacatcggaagtaattatgtatactggtaccagcagctcccaggaacggcccccaaactcctcatctataggaataatcagcggccctcaggggtccctgaccgattctctggctccaagtctggcacctcagcctccctggccatcagtgggctccggtccgaggatgaggctgattattactgtgcagcatgggatgacagcctgagtggcccctccgtggtattcggcggagggaccaagctgaccgtcctagagcagaaactgatcagcgaggaagatctgaatcctggcggaggcggaggaagtggtggcggaggttctggtggcggtggatcaggcggtggcggatctggatctatggatatccagatgacccagtccccgagctccctgtccgcctctgtgggcgatagggtcaccatcacctgccgtgccagtcaggacatccgtaattatctgaactggtatcaacagaaaccaggaaaagctccgaaactactgatttactatacctcccgcctggagtctggagtcccttctcgcttctctggttctggttctgggacggattacactctgaccatcagcagtctgcaaccggaagacttcgcaacttattactgtcagcaaggtaatactctgccgtggacgttcggacagggcaccaaggtggagatcaaaggcggcggcggaagtggaggaggaggctcaggcggaggagggagcgaggttcagctggtggagtctggcggtggcctggtgcagccagggggctcactccgtttgtcctgtgcagcttctggctactcctttaccggctacactatgaactgggtgcgtcaggccccaggtaagggcctggaatgggttgcactgattaatcctaccaaaggtgttagtacctacaaccagaagttcaaggaccgtttcactataagcgtagataaatccaaaaacacagcctacctgcaaatgaacagcctgcgtgctgaggacactgccgtctattattgtgctagaagcggatactacggcgatagtgactggtattttgacgtgtggggtcaaggaaccctggtcaccgtctcctcgacatctggcggcggaggatctctggaatctggacaggtgctgctggaaagcaacatcaaggtgctgcccacctggtctaccccagttcagcctatggctctgattgtgcttggcggagttgccggcctgctgctctttatcggcctgggcatcttcttttgcgtgcggtgcagacatcggcggagacaggctgagagaatgagccagatcaagcggctgctgagcgagaagaaaacctgtcagtgccctcaccggttccagaaaacatgcagccccatc

SEQ ID NO: 595 - DNA, 1935 bp, Artificial Sequence
  Description of Artificial Sequence: Synthetic polynucleotide
atggctctgcctgtgacagctctgttgctgcctctggctctgctgctgcatgctgctagacctcaggtgcagctggtgcagtctggggctgaggtgaagaagcctggggcctcagtgaaggtctcctgcaaggcttctggttacacctttaccagctatggtatcagctgggtgcgacaggcccctggacaagggcttgagtggatgggatggatcggcgcttacaatggtaacacaaactatgcacagaagctccagggcagagtcaccatgaccacagacacatccacgagcacagcctacatggagctgaggagcctgaggagcgacgacacggccgtgtattactgtgcgagggacctgaggcggtatagcagcagctgggacggccccgggtactggggccagggaaccctggtcaccgtgtcctcagggtcaacctctggtagcggtaagcctggctccggcgaaggctccacaaagggtcagtctgccctgactcagcctgcctccgtgtctgggtctcctggacagtcgatcaccatctcctgcactggaaccagcagtgacgttggtggttataactatgtctcctggtaccaacaacacccaggcaaagcccccaaactcatgatttatgatgtcagtaatcggccctcaggggtttctaatcgcttctctggctccaagtctggcaacacggcctccctgaccatctctgggctccaggctgaggacgaggctgattattactgcagctcatatacaagcagcagcactcgggtcttcggaactgggaccaagctgaccgtcctagagcagaaactgatcagcgaggaagatctgaatcctggcggaggcggaggaagtggtggcggaggttctggtggcggtggatcaggcggtggcggatctggatctatggatatccagatgacccagtccccgagctccctgtccgcctctgtgggcgatagggtcaccatcacctgccgtgccagtcaggacatccgtaattatctgaactggtatcaacagaaaccaggaaaagctccgaaactactgatttactatacctcccgcctggagtctggagtcccttctcgcttctctggttctggttctgggacggattacactctgaccatcagcagtctgcaaccggaagacttcgcaacttattactgtcagcaaggtaatactctgccgtggacgttcggacagggcaccaaggtggagatcaaaggcggcggcggaagtggaggaggaggctcaggcggaggagggagcgaggttcagctggtggagtctggcggtggcctggtgcagccagggggctcactccgtttgtcctgtgcagcttctggctactcctttaccggctacactatgaactgggtgcgtcaggccccaggtaagggcctggaatgggttgcactgattaatcctaccaaaggtgttagtacctacaaccagaagttcaaggaccgtttcactataagcgtagataaatccaaaaacacagcctacctgcaaatgaacagcctgcgtgctgaggacactgccgtctattattgtgctagaagcggatactacggcgatagtgactggtattttgacgtgtggggtcaaggaaccctggtcaccgtctcctcgacatctggcggcggaggatctctggaatctggacaggtgctgctggaaagcaacatcaaggtgctgcccacctggtctaccccagttcagcctatggctctgattgtgcttggcggagttgccggcctgctgctctttatcggcctgggcatcttcttttgcgtgcggtgcagacatcggcggagacaggctgagagaatgagccagatcaagcggctgctgagcgagaagaaaacctgtcagtgccctcaccggttccagaaaacatgcagccccatc

SEQ ID NO: 596 - DNA, 1932 bp, Artificial Sequence
  Description of Artificial Sequence: Synthetic polynucleotide
atggctctgcctgtgacagctctgttgctgcctctggctctgctgctgcatgctgctagacctcaggtgcagctggtgcagtctggggctgaggtgaagaagcctgggtcctcggtgaaggtctcctgcaaggcttctggaggcaccttcagcagctatgctatcagctgggtgcgacaggcccctggacaagggcttgagtggatgggagggatcatccctatctttggtacagcaaactacgcacagaagttccagggcagagtcacgattaccgcggacgaatccacgagcacagcctacatggagctgagcagcctgaggagcgaggacacggccgtgtattactgtgcgagagacatattacgattgagcgtgtcctcgggtatggacgtctggggccaagggaccctggtcaccgtgtcctcagggtcaacctctggtagcggtaagcctggctccggcgaaggctccacaaagggttcctatgtgctgactcagccaccctcagcgtctgggacccccgggcagagggtcaccatctcttgttctggaagcagctccaacatcggaggtaattatgtatactggtaccagcagctcccaggaacggcccccaaactcctcatctataggaataatcagcggccctcaggggtccctgaccgattctctggctccaagtctggcacctcagcctccctggccatcagtgggctccggtccgaggatgaggctgattattactgtgcagcatgggatgacagcctgagtggttgggtgttcggcggagggaccaagctgaccgtcctagagcagaaactgatcagcgaggaagatctgaatcctggcggaggcggaggaagtggtggcggaggttctggtggcggtggatcaggcggtggcggatctggatctatggatatccagatgacccagtccccgagctccctgtccgcctctgtgggcgatagggtcaccatcacctgccgtgccagtcaggacatccgtaattatctgaactggtatcaacagaaaccaggaaaagctccgaaactactgatttactatacctcccgcctggagtctggagtcccttctcgcttctctggttctggttctgggacggattacactctgaccatcagcagtctgcaaccggaagacttcgcaacttattactgtcagcaaggtaatactctgccgtggacgttcggacagggcaccaaggtggagatcaaaggcggcggcggaagtggaggaggaggctcaggcggaggagggagcgaggttcagctggtggagtctggcggtggcctggtgcagccagggggctcactccgtttgtcctgtgcagcttctggctactcctttaccggctacactatgaactgggtgcgtcaggccccaggtaagggcctggaatgggttgcactgattaatcctaccaaaggtgttagtacctacaaccagaagttcaaggaccgtttcactataagcgtagataaatccaaaaacacagcctacctgcaaatgaacagcctgcgtgctgaggacactgccgtctattattgtgctagaagcggatactacggcgatagtgactggtattttgacgtgtggggtcaaggaaccctggtcaccgtctcctcgacatctggcggcggaggatctctggaatctggacaggtgctgctggaaagcaacatcaaggtgctgcccacctggtctaccccagttcagcctatggctctgattgtgcttggcggagttgccggcctgctgctctttatcggcctgggcatcttcttttgcgtgcggtgcagacatcggcggagacaggctgagagaatgagccagatcaagcggctgctgagcgagaagaaaacctgtcagtgccctcaccggttccagaaaacatgcagccccatc

SEQ ID NO: 597 - DNA, 1938 bp, Artificial Sequence
  Description of Artificial Sequence: Synthetic polynucleotide
atggctctgcctgtgacagctctgttgctgcctctggctctgctgctgcatgctgctagacctcaggttcagctggtgcagtctggggctgaggtgaagaagcctgggtcctcggtgaaggtctcctgcaaggcttctggaggcaccttcagcagctatgctatcagctgggtgcgacaggcccctggacaagggcttgagtggatgggagggatcatccctatctttggtacagcaaactacgcacagaagttccagggcagagtcacgattaccgcggacaaatccacgagcacagcctacatggagctgagcagcctgaggagcgaggacacggccgtgtattactgtgcgagagatgggggtcgatacagctatgggaggtcctttgactactggggccagggaaccctggtcaccgtgtcctcagggtcaacctctggtagcggtaagcctggctccggcgaaggctccacaaagggtcagtctgtgttgacgcagccgccctcagtgtctggggccccagggcagagggtcaccatctcctgcactgggagcagctccaacatcggggcaggttatgatgtacactggtaccagcagcttccaggaacagcccccaaactcctcatctatggtaacagcaatcggccctcaggggtccctgaccgattctccggctccaagtctggcacctcagcctccctggccatcactgggctccaggctgaggatgaggctgattattactgccagtcctatgacagcagcctgagtggtcccgtggtattcggcggagggaccaagctgaccgtcctagagcagaaactgatcagcgaggaagatctgaatcctggcggaggcggaggaagtggtggcggaggttctggtggcggtggatcaggcggtggcggatctggatctatggatatccagatgacccagtccccgagctccctgtccgcctctgtgggcgatagggtcaccatcacctgccgtgccagtcaggacatccgtaattatctgaactggtatcaacagaaaccaggaaaagctccgaaactactgatttactatacctcccgcctggagtctggagtcccttctcgcttctctggttctggttctgggacggattacactctgaccatcagcagtctgcaaccggaagacttcgcaacttattactgtcagcaaggtaatactctgccgtggacgttcggacagggcaccaaggtggagatcaaaggcggcggcggaagtggaggaggaggctcaggcggaggagggagcgaggttcagctggtggagtctggcggtggcctggtgcagccagggggctcactccgtttgtcctgtgcagcttctggctactcctttaccggctacactatgaactgggtgcgtcaggccccaggtaagggcctggaatgggttgcactgattaatcctaccaaaggtgttagtacctacaaccagaagttcaaggaccgtttcactataagcgtagataaatccaaaaacacagcctacctgcaaatgaacagcctgcgtgctgaggacactgccgtctattattgtgctagaagcggatactacggcgatagtgactggtattttgacgtgtggggtcaaggaaccctggtcaccgtctcctcgacatctggcggcggaggatctctggaatctggacaggtgctgctggaaagcaacatcaaggtgctgcccacctggtctaccccagttcagcctatggctctgattgtgcttggcggagttgccggcctgctgctctttatcggcctgggcatcttcttttgcgtgcggtgcagacatcggcggagacaggctgagagaatgagccagatcaagcggctgctgagcgagaagaaaacctgtcagtgccctcaccggttccagaaaacatgcagccccatc

SEQ ID NO: 598 - DNA, 1929 bp, Artificial Sequence
  Description of Artificial Sequence: Synthetic polynucleotide
atggctctgcctgtgacagctctgttgctgcctctggctctgctgctgcatgctgctagacctcaggttcagctggtgcagtctggggctgaggtgaagaagcctgggtcctcggtgaaggtctcctgcaaggcttctggaggcaccttcagcagctatgctatcagctgggtgcgacaggcccctggacaagggcttgagtggatgggagggatcatccctatctttggtacagcaaactacgcacagaagttccagggcagagtcacgattaccgcggacgaatccacgagcacagcctacatggagctgagcagcctgaggagcgaggacacggccgtgtattactgtgcgagaccattacggcccctacactactacggtatggacgtctggggccaagggaccctggtcaccgtgtcctcagggtcaacctctggtagcggtaagcctggctccggcgaaggctccacaaagggtcagtctgtgctgacgcagccgccctcagcgtctgggacccccgggcagagggtcaccatctcttgttctggaagcagctccaacatcggaagtaattatgtatactggtaccagcagctcccaggaacggcccccaaactcctcatctataggaataatcagcggccctcaggggtccctgaccgattctctggctccaagtctggcacctcagcctccctggccatcagtgggctccggtccgaggatgaggctgattattactgtgcagcatgggatgacagcctgaccgagggggtgttcggcggagggaccaagctgaccgtcctagagcagaaactgatcagcgaggaagatctgaatcctggcggaggcggaggaagtggtggcggaggttctggtggcggtggatcaggcggtggcggatctggatctatggatatccagatgacccagtccccgagctccctgtccgcctctgtgggcgatagggtcaccatcacctgccgtgccagtcaggacatccgtaattatctgaactggtatcaacagaaaccaggaaaagctccgaaactactgatttactatacctcccgcctggagtctggagtcccttctcgcttctctggttctggttctgggacggattacactctgaccatcagcagtctgcaaccggaagacttcgcaacttattactgtcagcaaggtaatactctgccgtggacgttcggacagggcaccaaggtggagatcaaaggcggcggcggaagtggaggaggaggctcaggcggaggagggagcgaggttcagctggtggagtctggcggtggcctggtgcagccagggggctcactccgtttgtcctgtgcagcttctggctactcctttaccggctacactatgaactgggtgcgtcaggccccaggtaagggcctggaatgggttgcactgattaatcctaccaaaggtgttagtacctacaaccagaagttcaaggaccgtttcactataagcgtagataaatccaaaaacacagcctacctgcaaatgaacagcctgcgtgctgaggacactgccgtctattattgtgctagaagcggatactacggcgatagtgactggtattttgacgtgtggggtcaaggaaccctggtcaccgtctcctcgacatctggcggcggaggatctctggaatctggacaggtgctgctggaaagcaacatcaaggtgctgcccacctggtctaccccagttcagcctatggctctgattgtgcttggcggagttgccggcctgctgctctttatcggcctgggcatcttcttttgcgtgcggtgcagacatcggcggagacaggctgagagaatgagccagatcaagcggctgctgagcgagaagaaaacctgtcagtgccctcaccggttccagaaaacatgcagccccatc

SEQ ID NO: 599 - DNA, 1932 bp, Artificial Sequence
  Description of Artificial Sequence: Synthetic polynucleotide
atggctctgcctgtgacagctctgttgctgcctctggctctgctgctgcatgctgctagacctcaggtgcagctggtggagtctgggggaggcgtggtccagcctgggaggtccctgagactctcctgtgcagcgtctggattcaccttcagtagctatggcatgcactgggtccgccgggctccaggcaaggggctggagtgggtggcagttatatcatatgatggaagtaataaatactatgcagactccgtgaagggccgattcaccatctccagagacaattccaagaacacgctgtatctgcaaatgaacagcctgagagctgaggacacggctgtgtattactgtgcgaaagatgggggcgacagtgggagtcttgactactggggccagggaaccctggtcaccgtgtcctcagggtcaacctctggtagcggtaagcctggctccggcgaaggctccacaaagggtgacatcgtgatgacccagtctccagactccctggctgtgtctctgggcgagagggccaccatcaactgcaagtccagccagagtgttttatacagctccaacaataagaactacttagcttggtaccagcagaaaccaggacagcctcctaagctgctcatttactgggcatctacccgggaatccggggtccctgaccgattcagtggcagcgggtctgggacagatttcactctcaccatcagcagcctgcaggctgaagatgtggcagtttattactgtcagcaatattatagtactccgctcactttcggcggagggaccaagctggagatcaaagagcagaaactgatcagcgaggaagatctgaatcctggcggaggcggaggaagtggtggcggaggttctggtggcggtggatcaggcggtggcggatctggatctatggatatccagatgacccagtccccgagctccctgtccgcctctgtgggcgatagggtcaccatcacctgccgtgccagtcaggacatccgtaattatctgaactggtatcaacagaaaccaggaaaagctccgaaactactgatttactatacctcccgcctggagtctggagtcccttctcgcttctctggttctggttctgggacggattacactctgaccatcagcagtctgcaaccggaagacttcgcaacttattactgtcagcaaggtaatactctgccgtggacgttcggacagggcaccaaggtggagatcaaaggcggcggcggaagtggaggaggaggctcaggcggaggagggagcgaggttcagctggtggagtctggcggtggcctggtgcagccagggggctcactccgtttgtcctgtgcagcttctggctactcctttaccggctacactatgaactgggtgcgtcaggccccaggtaagggcctggaatgggttgcactgattaatcctaccaaaggtgttagtacctacaaccagaagttcaaggaccgtttcactataagcgtagataaatccaaaaacacagcctacctgcaaatgaacagcctgcgtgctgaggacactgccgtctattattgtgctagaagcggatactacggcgatagtgactggtattttgacgtgtggggtcaaggaaccctggtcaccgtctcctcgacatctggcggcggaggatctctggaatctggacaggtgctgctggaaagcaacatcaaggtgctgcccacctggtctaccccagttcagcctatggctctgattgtgcttggcggagttgccggcctgctgctctttatcggcctgggcatcttcttttgcgtgcggtgcagacatcggcggagacaggctgagagaatgagccagatcaagcggctgctgagcgagaagaaaacctgtcagtgccctcaccggttccagaaaacatgcagccccatc

SEQ ID NO: 600 - DNA, 1917 bp, Artificial Sequence
  Description of Artificial Sequence: Synthetic polynucleotide
atggctctgcctgtgacagctctgttgctgcctctggctctgctgctgcatgctgctagacctgaggtgcagctgttggagtctgggggaggcttggtccagcctggggggtccctgagactctcctgtgcagcctctggattcacctttagtagctattggatgagctgggtccgccaggctccagggaaggggctggagtgggtggccaacataaagcaagatggaagtgagaaatactatgtggactctgtgaagggccgattcaccatctccagagacaacgccaagaactcactgtatctgcaaatgaacagcctgagagccgaggacacggctgtgtattactgtgcgagaccggcgggccagctgctctacggtatggacgtctggggccaagggaccctggtcaccgtgtcctcagggtcaacctctggtagcggtaagcctggctccggcgaaggctccacaaagggttcctatgtgctgactcagccaccctcggtgtcagtgtccccaggacagacggccaggatcacctgctctggagatgcattgccaaagcaatatgcttattggtaccagcagaagccaggccaggcccctgtgctggtgatatataaagacagtgagaggccctcagggatccctgagcgattctctggctccagctcagggacaacagtcacgttgaccatcagtggagtccaggcagaagacgaggctgactattactgtcaatcagcagacagcagtggtacttgggtgttcggcggaggcaccaagctgaccgtcctcgagcagaaactgatcagcgaggaagatctgaatcctggcggaggcggaggaagtggtggcggaggttctggtggcggtggatcaggcggtggcggatctggatctatggatatccagatgacccagtccccgagctccctgtccgcctctgtgggcgatagggtcaccatcacctgccgtgccagtcaggacatccgtaattatctgaactggtatcaacagaaaccaggaaaagctccgaaactactgatttactatacctcccgcctggagtctggagtcccttctcgcttctctggttctggttctgggacggattacactctgaccatcagcagtctgcaaccggaagacttcgcaacttattactgtcagcaaggtaatactctgccgtggacgttcggacagggcaccaaggtggagatcaaaggcggcggcggaagtggaggaggaggctcaggcggaggagggagcgaggttcagctggtggagtctggcggtggcctggtgcagccagggggctcactccgtttgtcctgtgcagcttctggctactcctttaccggctacactatgaactgggtgcgtcaggccccaggtaagggcctggaatgggttgcactgattaatcctaccaaaggtgttagtacctacaaccagaagttcaaggaccgtttcactataagcgtagataaatccaaaaacacagcctacctgcaaatgaacagcctgcgtgctgaggacactgccgtctattattgtgctagaagcggatactacggcgatagtgactggtattttgacgtgtggggtcaaggaaccctggtcaccgtctcctcgacatctggcggcggaggatctctggaatctggacaggtgctgctggaaagcaacatcaaggtgctgcccacctggtctaccccagttcagcctatggctctgattgtgcttggcggagttgccggcctgctgctctttatcggcctgggcatcttcttttgcgtgcggtgcagacatcggcggagacaggctgagagaatgagccagatcaagcggctgctgagcgagaagaaaacctgtcagtgccctcaccggttccagaaaacatgcagccccatc

SEQ ID NO: 601 - DNA, 1932 bp, Artificial Sequence
  Description of Artificial Sequence: Synthetic polynucleotide
atggctctgcctgtgacagctctgttgctgcctctggctctgctgctgcatgctgctagacctgaggtgcagctgttggagtctgggggaggcgtggtccagcctgggaggtccctgagactctcctgtgcagcctctggattcaccttcagtagctatggcatgcactgggtccgccaggctccaggcaaggggctggagtgggtggcagttatatcatatgatggaagtaataaatactatgcagactccgtgaagggccgattcaccatctccagagacaattccaagaacacgctgtatctgcaaatgaacagcctgagagctgaggacacggctgtgtattactgtgcgaaagatgccgcggatatgggggcctttgactactggggccagggaaccctggtcaccgtgtcctcagggtcaacctctggtagcggtaagcctggctccggcgaaggctccacaaagggtgacatccagatgacccagtctccagactccctggctgtgtctctgggcgagagggccaccatgaactgcaagtccagccagagtgttttatacagctccaacaataagaactacttagcttggtaccagcagaaaccaggacagcctcctaagctgctcatttactgggcatctgcccgggaatctggggtccctgaccgattcagtggcagcgggtctgggacagatttcactctcaccatcagcagcctgcaggctgaagatgtggcagtttattactgtcagcaatattatagtactcctctcacttttggccaggggaccaaggtggaaatcaaagagcagaaactgatcagcgaggaagatctgaatcctggcggaggcggaggaagtggtggcggaggttctggtggcggtggatcaggcggtggcggatctggatctatggatatccagatgacccagtccccgagctccctgtccgcctctgtgggcgatagggtcaccatcacctgccgtgccagtcaggacatccgtaattatctgaactggtatcaacagaaaccaggaaaagctccgaaactactgatttactatacctcccgcctggagtctggagtcccttctcgcttctctggttctggttctgggacggattacactctgaccatcagcagtctgcaaccggaagacttcgcaacttattactgtcagcaaggtaatactctgccgtggacgttcggacagggcaccaaggtggagatcaaaggcggcggcggaagtggaggaggaggctcaggcggaggagggagcgaggttcagctggtggagtctggcggtggcctggtgcagccagggggctcactccgtttgtcctgtgcagcttctggctactcctttaccggctacactatgaactgggtgcgtcaggccccaggtaagggcctggaatgggttgcactgattaatcctaccaaaggtgttagtacctacaaccagaagttcaaggaccgtttcactataagcgtagataaatccaaaaacacagcctacctgcaaatgaacagcctgcgtgctgaggacactgccgtctattattgtgctagaagcggatactacggcgatagtgactggtattttgacgtgtggggtcaaggaaccctggtcaccgtctcctcgacatctggcggcggaggatctctggaatctggacaggtgctgctggaaagcaacatcaaggtgctgcccacctggtctaccccagttcagcctatggctctgattgtgcttggcggagttgccggcctgctgctctttatcggcctgggcatcttcttttgcgtgcggtgcagacatcggcggagacaggctgagagaatgagccagatcaagcggctgctgagcgagaagaaaacctgtcagtgccctcaccggttccagaaaacatgcagccccatc

SEQ ID NO: 602 - DNA, 1932 bp, Artificial Sequence
  Description of Artificial Sequence: Synthetic polynucleotide
atggctctgcctgtgacagctctgttgctgcctctggctctgctgctgcatgctgctagacctgaggtgcagctgttggagtctgggggaggcctggtcaagcctggggggtccctgagactctcctgtgcagcctctggattcaccttcagtagctatagcatgaactgggtccgccaggctccagggaaggggctggagtgggtctcagctattagtggtagtggtggtagcacatactacgcagactccgtgaagggccggttcaccatctccagagacaattccaagaacacgctgtatctgcaaatgaacagcctgagagccgaggacacggctgtgtattactgtgcgagagcacgtggatacagctatggctctgatgcttttgatatctggggccaagggacaatggtcaccgtgtcttcagggtcaacctctggtagcggtaagcctggctccggcgaaggctccacaaagggtcagtctgtgctgactcagccaccctcagcgtctgggacccccgggcagagggtcaccatctcttgttctggaagcagctccaacatcggaagtaattatgtatactggtaccagcagctcccaggaacggcccccaaactcctcatctataggaataatcagcggccctcaggggtccctgaccgattctctggctccaagtctggcacctcagcctccctggccatcagtgggctccggtccgaggatgaggctgattattactgtgcagcatgggatgacagcctgagtggcgtggtattcggcggagggaccaagctgaccgtcctagagcagaaactgatcagcgaggaagatctgaatcctggcggaggcggaggaagtggtggcggaggttctggtggcggtggatcaggcggtggcggatctggatctatggatatccagatgacccagtccccgagctccctgtccgcctctgtgggcgatagggtcaccatcacctgccgtgccagtcaggacatccgtaattatctgaactggtatcaacagaaaccaggaaaagctccgaaactactgatttactatacctcccgcctggagtctggagtcccttctcgcttctctggttctggttctgggacggattacactctgaccatcagcagtctgcaaccggaagacttcgcaacttattactgtcagcaaggtaatactctgccgtggacgttcggacagggcaccaaggtggagatcaaaggcggcggcggaagtggaggaggaggctcaggcggaggagggagcgaggttcagctggtggagtctggcggtggcctggtgcagccagggggctcactccgtttgtcctgtgcagcttctggctactcctttaccggctacactatgaactgggtgcgtcaggccccaggtaagggcctggaatgggttgcactgattaatcctaccaaaggtgttagtacctacaaccagaagttcaaggaccgtttcactataagcgtagataaatccaaaaacacagcctacctgcaaatgaacagcctgcgtgctgaggacactgccgtctattattgtgctagaagcggatactacggcgatagtgactggtattttgacgtgtggggtcaaggaaccctggtcaccgtctcctcgacatctggcggcggaggatctctggaatctggacaggtgctgctggaaagcaacatcaaggtgctgcccacctggtctaccccagttcagcctatggctctgattgtgcttggcggagttgccggcctgctgctctttatcggcctgggcatcttcttttgcgtgcggtgcagacatcggcggagacaggctgagagaatgagccagatcaagcggctgctgagcgagaagaaaacctgtcagtgccctcaccggttccagaaaacatgcagccccatc

SEQ ID NO: 603 - DNA, 1935 bp, Artificial Sequence
  Description of Artificial Sequence: Synthetic polynucleotide
atggctctgcctgtgacagctctgttgctgcctctggctctgctgctgcatgctgctagacctcaggttcagctggtgcagtctgggggaggcgtggtccagcctgggaggtccctgagactctcctgtgcagcctctggattcaccttcagtagctatggcatgcactgggtccgccaggctccaggcaaggggctggagtgggtggcagttatatcatatgatggaagtaataaatactatgcagactccgtgaagggccgattcaccatctccagagacaattccaagaacacgctgtatctgcaaatgaacagcctgagagctgaggacacggctgtgtattactgtgcgaaaggtgtcccccggtactactactactacggtatggacgtctggggccaagggacaatggtcaccgtgtcttcagggtcaacctctggtagcggtaagcctggctccggcgaaggctccacaaagggtcagtctgtgttgacgcagccgccctcagtgtctggggccccagggcagagggtcaccatctcctgcactgggagcagctccaacatcggggcaggttatgatgtacactggtaccagcagcttccaggaacagcccccaaactcctcatctatggtaacagcaatcggccctcaggggtccctgaccgattctctggctccaagtctggcacctcagcctccctggccatcactgggctccaggctgaggatgaggctgattattactgccagtcctatgacagcagcctgagtggttcggtgttcggcggagggaccaagctgaccgtcctagagcagaaactgatcagcgaggaagatctgaatcctggcggaggcggaggaagtggtggcggaggttctggtggcggtggatcaggcggtggcggatctggatctatggatatccagatgacccagtccccgagctccctgtccgcctctgtgggcgatagggtcaccatcacctgccgtgccagtcaggacatccgtaattatctgaactggtatcaacagaaaccaggaaaagctccgaaactactgatttactatacctcccgcctggagtctggagtcccttctcgcttctctggttctggttctgggacggattacactctgaccatcagcagtctgcaaccggaagacttcgcaacttattactgtcagcaaggtaatactctgccgtggacgttcggacagggcaccaaggtggagatcaaaggcggcggcggaagtggaggaggaggctcaggcggaggagggagcgaggttcagctggtggagtctggcggtggcctggtgcagccagggggctcactccgtttgtcctgtgcagcttctggctactcctttaccggctacactatgaactgggtgcgtcaggccccaggtaagggcctggaatgggttgcactgattaatcctaccaaaggtgttagtacctacaaccagaagttcaaggaccgtttcactataagcgtagataaatccaaaaacacagcctacctgcaaatgaacagcctgcgtgctgaggacactgccgtctattattgtgctagaagcggatactacggcgatagtgactggtattttgacgtgtggggtcaaggaaccctggtcaccgtctcctcgacatctggcggcggaggatctctggaatctggacaggtgctgctggaaagcaacatcaaggtgctgcccacctggtctaccccagttcagcctatggctctgattgtgcttggcggagttgccggcctgctgctctttatcggcctgggcatcttcttttgcgtgcggtgcagacatcggcggagacaggctgagagaatgagccagatcaagcggctgctgagcgagaagaaaacctgtcagtgccctcaccggttccagaaaacatgcagccccatc

SEQ ID NO: 604 - DNA, 1944 bp, Artificial Sequence
  Description of Artificial Sequence: Synthetic polynucleotide
atggctctgcctgtgacagctctgttgctgcctctggctctgctgctgcatgctgctagacctgaggtgcagctggtgcagtctggggctgaggtgaagaagcctgggtcctcggtgaaggtctcctgcaaggcttccggaggcaccttcagcagctatgctatcagctgggtgcgacaggcccctggacaagggcttgagtggatgggagggatcatccctatctttggtacagcaaactacgcacagaagttccagggcagagtcacgattaccgcggacgaatccacgagcacagcctacatggagctgagcagcctgaggagcgaggacacggccgtgtattactgtgcgagagatcgggggagaagatattgtagtggtggtagctgccctaatgcttttgatatctggggccaagggacaatggtcaccgtgtcttcagggtcaacctctggtagcggtaagcctggctccggcgaaggctccacaaagggtgaaattgtgttgacacagtctccagccaccctgtctgtgtctccaggggaaagagccaccctctcctgcagggccagtcagagtgttagcagcaacttagcctggtaccagcagaaacctggccaggctcccaggctcctcatctatggtgcatccaccagggccactggtatcccagccaggttcagtggcagtgggtctgggacagagttcactctcaccatcagcagcctgcagtctgaagattttgcagtttattactgtcagcagtataataactggcccccggccctcactttcggcggagggaccaaggtggaaatcaaagagcagaaactgatcagcgaggaagatctgaatcctggcggaggcggaggaagtggtggcggaggttctggtggcggtggatcaggcggtggcggatctggatctatggatatccagatgacccagtccccgagctccctgtccgcctctgtgggcgatagggtcaccatcacctgccgtgccagtcaggacatccgtaattatctgaactggtatcaacagaaaccaggaaaagctccgaaactactgatttactatacctcccgcctggagtctggagtcccttctcgcttctctggttctggttctgggacggattacactctgaccatcagcagtctgcaaccggaagacttcgcaacttattactgtcagcaaggtaatactctgccgtggacgttcggacagggcaccaaggtggagatcaaaggcggcggcggaagtggaggaggaggctcaggcggaggagggagcgaggttcagctggtggagtctggcggtggcctggtgcagccagggggctcactccgtttgtcctgtgcagcttctggctactcctttaccggctacactatgaactgggtgcgtcaggccccaggtaagggcctggaatgggttgcactgattaatcctaccaaaggtgttagtacctacaaccagaagttcaaggaccgtttcactataagcgtagataaatccaaaaacacagcctacctgcaaatgaacagcctgcgtgctgaggacactgccgtctattattgtgctagaagcggatactacggcgatagtgactggtattttgacgtgtggggtcaaggaaccctggtcaccgtctcctcgacatctggcggcggaggatctctggaatctggacaggtgctgctggaaagcaacatcaaggtgctgcccacctggtctaccccagttcagcctatggctctgattgtgcttggcggagttgccggcctgctgctctttatcggcctgggcatcttcttttgcgtgcggtgcagacatcggcggagacaggctgagagaatgagccagatcaagcggctgctgagcgagaagaaaacctgtcagtgccctcaccggttccagaaaacatgcagccccatc

SEQ ID NO: 605 - DNA, 1944 bp, Artificial Sequence
  Description of Artificial Sequence: Synthetic polynucleotide
atggctctgcctgtgacagctctgttgctgcctctggctctgctgctgcatgctgctagacctcaggttcagctggtgcagtctggggctgaggtgaagaagcctgggtcctcggtgaaggtctcctgcaaggcttctggaggcaccttcagcagctatgctatcagctgggtgcgacaggcccctggacaagggcttgagtggatgggagggatcatccctatctttggtacagcaaactacgcacagaagttccagggcagagtcacgattaccgcggacgaatccacgagcacagcctacatggagctgagcagcctgaggagcgaggacacggccgtgtattactgtgcgagagggggttacgtttgggggagttatcgtcagaactccaactggttcgacccctggggccagggaaccctggtcaccgtgtcctcagggtcaacctctggtagcggtaagcctggctccggcgaaggctccacaaagggttcctatgtgctgactcagccaccctcagcgtctgggacccccgggcagagggtcaccatctcttgttctggaagcagctccaacatcggaagtaattatgtatactggtaccagcagctcccaggaacggcccccaaactcctcatctataggaataatcagcggccctcaggggtccctgaccgattctctggctccaagtctggcacctcagcctccctggccatcagtgggctccggtccgaggatgaggctgattattactgtgcagcatgggatgacagcctgagtggttgggtgttcggcggagggaccaagctgaccgtcctagagcagaaactgatcagcgaggaagatctgaatcctggcggaggcggaggaagtggtggcggaggttctggtggcggtggatcaggcggtggcggatctggatctatggatatccagatgacccagtccccgagctccctgtccgcctctgtgggcgatagggtcaccatcacctgccgtgccagtcaggacatccgtaattatctgaactggtatcaacagaaaccaggaaaagctccgaaactactgatttactatacctcccgcctggagtctggagtcccttctcgcttctctggttctggttctgggacggattacactctgaccatcagcagtctgcaaccggaagacttcgcaacttattactgtcagcaaggtaatactctgccgtggacgttcggacagggcaccaaggtggagatcaaaggcggcggcggaagtggaggaggaggctcaggcggaggagggagcgaggttcagctggtggagtctggcggtggcctggtgcagccagggggctcactccgtttgtcctgtgcagcttctggctactcctttaccggctacactatgaactgggtgcgtcaggccccaggtaagggcctggaatgggttgcactgattaatcctaccaaaggtgttagtacctacaaccagaagttcaaggaccgtttcactataagcgtagataaatccaaaaacacagcctacctgcaaatgaacagcctgcgtgctgaggacactgccgtctattattgtgctagaagcggatactacggcgatagtgactggtattttgacgtgtggggtcaaggaaccctggtcaccgtctcctcgacatctggcggcggaggatctctggaatctggacaggtgctgctggaaagcaacatcaaggtgctgcccacctggtctaccccagttcagcctatggctctgattgtgcttggcggagttgccggcctgctgctctttatcggcctgggcatcttcttttgcgtgcggtgcagacatcggcggagacaggctgagagaatgagccagatcaagcggctgctgagcgagaagaaaacctgtcagtgccctcaccggttccagaaaacatgcagccccatc

SEQ ID NO: 606 - DNA, 1932 bp, Artificial Sequence
  Description of Artificial Sequence: Synthetic polynucleotide
atggctctgcctgtgacagctctgttgctgcctctggctctgctgctgcatgctgctagacctcaggtgcagctggtggagtctggggctgaggtgaagaagcctgggtcctcggtgaaggtctcctgcaaggcttcgggaggcaccttcagcagctatgctatcagctgggtgcgacaggcccctggacaagggcttgagtggatgggagggatcatccctatctttggtacagcaaactacgcacagaagttccagggcagagtcacgattaccgcggacgaatccacgagcacagcctacatggagctgagcagcctgaggagcgaggacacggccgtgtattactgtgcgagagacatattacgattgagcgtgtcctcgggtatggacgtctggggccaagggaccctggtcaccgtgtcctcagggtcaacctctggtagcggtaagcctggctccggcgaaggctccacaaagggtcagtctgtgctgactcagccaccctcagcgtctgggacccccgggcggagggtcaccatctcttgttctggaagcagctccaacatcggaagtaattatgtatactggtaccagcagctcccaggaacggcccccaaactcctcatctataggaataatcagcggccctcaggggtccctgaccgattctctggctccaagtctggcacctcagcctccctggccatcagtgggctccggtccgaggatgaggctgattattactgtgcagcatgggatgacagcctgagtggtgtggtattcggcggagggaccaagctgaccgtcctagagcagaaactgatcagcgaggaagatctgaatcctggcggaggcggaggaagtggtggcggaggttctggtggcggtggatcaggcggtggcggatctggatctatggatatccagatgacccagtccccgagctccctgtccgcctctgtgggcgatagggtcaccatcacctgccgtgccagtcaggacatccgtaattatctgaactggtatcaacagaaaccaggaaaagctccgaaactactgatttactatacctcccgcctggagtctggagtcccttctcgcttctctggttctggttctgggacggattacactctgaccatcagcagtctgcaaccggaagacttcgcaacttattactgtcagcaaggtaatactctgccgtggacgttcggacagggcaccaaggtggagatcaaaggcggcggcggaagtggaggaggaggctcaggcggaggagggagcgaggttcagctggtggagtctggcggtggcctggtgcagccagggggctcactccgtttgtcctgtgcagcttctggctactcctttaccggctacactatgaactgggtgcgtcaggccccaggtaagggcctggaatgggttgcactgattaatcctaccaaaggtgttagtacctacaaccagaagttcaaggaccgtttcactataagcgtagataaatccaaaaacacagcctacctgcaaatgaacagcctgcgtgctgaggacactgccgtctattattgtgctagaagcggatactacggcgatagtgactggtattttgacgtgtggggtcaaggaaccctggtcaccgtctcctcgacatctggcggcggaggatctctggaatctggacaggtgctgctggaaagcaacatcaaggtgctgcccacctggtctaccccagttcagcctatggctctgattgtgcttggcggagttgccggcctgctgctctttatcggcctgggcatcttcttttgcgtgcggtgcagacatcggcggagacaggctgagagaatgagccagatcaagcggctgctgagcgagaagaaaacctgtcagtgccctcaccggttccagaaaacatgcagccccatc

SEQ ID NO: 607 - DNA, 1920 bp, Artificial Sequence
  Description of Artificial Sequence: Synthetic polynucleotide
atggctctgcctgtgacagctctgttgctgcctctggctctgctgctgcatgctgctagacctcaggtgcagctggtggagtctgggggaggcttggtccagcctggggggtccctgagactctcctgtgcagcctctggattcacctttagtagctattggatgagctgggtccgccaggctccagggaaggggctggagtgggtggccaacataaagcaagatggaagtgagaaatactatgtggactctgtgaagggccgattcaccatctccagagacaacgccaagaactcactgtatctgcaaatgaacagcctgagagccgaggacacggctgtgtattactgtgcgagatggagtcattactatgatagtagtggtcttgactactggggccagggaaccctggtcaccgtgtcctcagggtcaacctctggtagcggtaagcctggctccggcgaaggctccacaaagggttcctatgtgctgactcagccaccctcggtgtcagtgtccccaggacagacggccaggatcacctgctctggagatgcattgccaaagcaatatgcttattggtaccagcagaagccaggccaggcccctgtgctggtgatatataaagacagtgagaggccctcagggatccctgagcgattctctggctccagctcagggacaacagtcacgttgaccatcagtggagtccaggcagaagacgaggctgactattactgtcaatcagcagacagcagtggtacttgggtgttcggcggagggaccaagctgaccgtcctagagcagaaactgatcagcgaggaagatctgaatcctggcggaggcggaggaagtggtggcggaggttctggtggcggtggatcaggcggtggcggatctggatctatggatatccagatgacccagtccccgagctccctgtccgcctctgtgggcgatagggtcaccatcacctgccgtgccagtcaggacatccgtaattatctgaactggtatcaacagaaaccaggaaaagctccgaaactactgatttactatacctcccgcctggagtctggagtcccttctcgcttctctggttctggttctgggacggattacactctgaccatcagcagtctgcaaccggaagacttcgcaacttattactgtcagcaaggtaatactctgccgtggacgttcggacagggcaccaaggtggagatcaaaggcggcggcggaagtggaggaggaggctcaggcggaggagggagcgaggttcagctggtggagtctggcggtggcctggtgcagccagggggctcactccgtttgtcctgtgcagcttctggctactcctttaccggctacactatgaactgggtgcgtcaggccccaggtaagggcctggaatgggttgcactgattaatcctaccaaaggtgttagtacctacaaccagaagttcaaggaccgtttcactataagcgtagataaatccaaaaacacagcctacctgcaaatgaacagcctgcgtgctgaggacactgccgtctattattgtgctagaagcggatactacggcgatagtgactggtattttgacgtgtggggtcaaggaaccctggtcaccgtctcctcgacatctggcggcggaggatctctggaatctggacaggtgctgctggaaagcaacatcaaggtgctgcccacctggtctaccccagttcagcctatggctctgattgtgcttggcggagttgccggcctgctgctctttatcggcctgggcatcttcttttgcgtgcggtgcagacatcggcggagacaggctgagagaatgagccagatcaagcggctgctgagcgagaagaaaacctgtcagtgccctcaccggttccagaaaacatgcagccccatc

SEQ ID NO: 608 - DNA, 1941 bp, Artificial Sequence
  Description of Artificial Sequence: Synthetic polynucleotide
atggctctgcctgtgacagctctgttgctgcctctggctctgctgctgcatgctgctagacctcaggtgcagctggtggagtctggggctgaggtgaagaagcctgggtcctcggtgaaggtctcctgcaaggcttctggaggcaccttcagcagctatgctatcagctgggtgcgacaggcccctggacaagggcttgagtggatgggagggatcatccctatctttggtacagcaaactacgcacagaagttccagggcagagtcacgattaccgcggacaaatccacgagcacagcctacatggagctgagcagcctgaggagcgaggacacggccgtgtattactgtgcgaggacccatctaccatacagctatggtttaggcgggtttgactactggggccagggaaccctggtcaccgtgtcctcagggtcaacctctggtagcggtaagcctggctccggcgaaggctccacaaagggtcagtctgtgctgacgcagccgccctcagtgtctggggccccagggcagagggtcaccatctcctgcactgggagcagctccaacatcggggcaggttatgatgtacactggtaccagcagcttccaggaacagcccccaaactcctcatctatggtaacagcaatcggccctcaggggtccctgaccgattctctggctccaagtctggcacctcagcctccctggccatcactgggctccaggctgaggatgaggctgattattactgccagtcctatgacagcagcctgagtggcccggtggtattcggcggagggaccaaggtcaccgtcctagagcagaaactgatcagcgaggaagatctgaatcctggcggaggcggaggaagtggtggcggaggttctggtggcggtggatcaggcggtggcggatctggatctatggatatccagatgacccagtccccgagctccctgtccgcctctgtgggcgatagggtcaccatcacctgccgtgccagtcaggacatccgtaattatctgaactggtatcaacagaaaccaggaaaagctccgaaactactgatttactatacctcccgcctggagtctggagtcccttctcgcttctctggttctggttctgggacggattacactctgaccatcagcagtctgcaaccggaagacttcgcaacttattactgtcagcaaggtaatactctgccgtggacgttcggacagggcaccaaggtggagatcaaaggcggcggcggaagtggaggaggaggctcaggcggaggagggagcgaggttcagctggtggagtctggcggtggcctggtgcagccagggggctcactccgtttgtcctgtgcagcttctggctactcctttaccggctacactatgaactgggtgcgtcaggccccaggtaagggcctggaatgggttgcactgattaatcctaccaaaggtgttagtacctacaaccagaagttcaaggaccgtttcactataagcgtagataaatccaaaaacacagcctacctgcaaatgaacagcctgcgtgctgaggacactgccgtctattattgtgctagaagcggatactacggcgatagtgactggtattttgacgtgtggggtcaaggaaccctggtcaccgtctcctcgacatctggcggcggaggatctctggaatctggacaggtgctgctggaaagcaacatcaaggtgctgcccacctggtctaccccagttcagcctatggctctgattgtgcttggcggagttgccggcctgctgctctttatcggcctgggcatcttcttttgcgtgcggtgcagacatcggcggagacaggctgagagaatgagccagatcaagcggctgctgagcgagaagaaaacctgtcagtgccctcaccggttccagaaaacatgcagccccatc

SEQ ID NO: 609 - DNA, 1947 bp, Artificial Sequence
  Description of Artificial Sequence: Synthetic polynucleotide
atggctctgcctgtgacagctctgttgctgcctctggctctgctgctgcatgctgctagacctgaggtgcagctggtgcagtctggggctgaggtgaagaagcctgggtcctcggtgaaggtctcctgcaaggcttctggaggcaccttcagcagctatgctatcagctgggtgcgacaggcccctggacaagggcttgagtggatgggagggatcatccctatctttggtacagcaaactacgcacagaagttccagggcagagtcacgattaccgcggacgaatccacgagcacagcctacatggagctgagcagcctgaggagcgaggacacggccgtgtattactgtgcgagagatccaagtcgggattactatggttcggggagattctcatggttcgacccctggggccagggaaccctggtcaccgtgtcctcagggtcaacctctggtagcggtaagcctggctccggcgaaggctccacaaagggtcagtctgtgctgactcagccaccctcagcgtctgggacccccgggcagagggtcaccatctcttgttctggaagcagctccaacatcggaagtaattatgtatactggtaccagcagctcccaggaacggcccccaaactcctcatctataggaataatcagcggccctcaggggtccctgaccgattctctggctccaagtctggcacctcagcctccctggccatcagtgggctccggtccgaggatgaggctgattattactgtgcagcatgggatgacagcctgagtggtcggggggtattcggcggagggaccaagctgaccgtcctagagcagaaactgatcagcgaggaagatctgaatcctggcggaggcggaggaagtggtggcggaggttctggtggcggtggatcaggcggtggcggatctggatctatggatatccagatgacccagtccccgagctccctgtccgcctctgtgggcgatagggtcaccatcacctgccgtgccagtcaggacatccgtaattatctgaactggtatcaacagaaaccaggaaaagctccgaaactactgatttactatacctcccgcctggagtctggagtcccttctcgcttctctggttctggttctgggacggattacactctgaccatcagcagtctgcaaccggaagacttcgcaacttattactgtcagcaaggtaatactctgccgtggacgttcggacagggcaccaaggtggagatcaaaggcggcggcggaagtggaggaggaggctcaggcggaggagggagcgaggttcagctggtggagtctggcggtggcctggtgcagccagggggctcactccgtttgtcctgtgcagcttctggctactcctttaccggctacactatgaactgggtgcgtcaggccccaggtaagggcctggaatgggttgcactgattaatcctaccaaaggtgttagtacctacaaccagaagttcaaggaccgtttcactataagcgtagataaatccaaaaacacagcctacctgcaaatgaacagcctgcgtgctgaggacactgccgtctattattgtgctagaagcggatactacggcgatagtgactggtattttgacgtgtggggtcaaggaaccctggtcaccgtctcctcgacatctggcggcggaggatctctggaatctggacaggtgctgctggaaagcaacatcaaggtgctgcccacctggtctaccccagttcagcctatggctctgattgtgcttggcggagttgccggcctgctgctctttatcggcctgggcatcttcttttgcgtgcggtgcagacatcggcggagacaggctgagagaatgagccagatcaagcggctgctgagcgagaagaaaacctgtcagtgccctcaccggttccagaaaacatgcagccccatc

SEQ ID NO: 610 - DNA, 1947 bp, Artificial Sequence
  Description of Artificial Sequence: Synthetic polynucleotide
atggctctgcctgtgacagctctgttgctgcctctggctctgctgctgcatgctgctagacctcaggtgcagctggtgcagtctggggctgaggtgaagaagcctggggcctcagtgaaggtctcctgcaaggcttctggttacacctttaccagctatggtatcagctgggtgcgacaggcccctggacaagggcttgagtggatgggatggatcagcgcttacaatggtaacacaaactatgcacagaagctccagggcagagtcaccatgaccacagacacatccacgagcacagcctacatggagctgaggagcctgaggagcgacgacacggccgtgtattactgtgcgagagatataatacgatattgtagtagtaccagctgctatagagggattgactactggggccagggaaccctggtcaccgtgtcctcagggtcaacctctggtagcggtaagcctggctccggcgaaggctccacaaagggtcagtctgccctgactcagcctgcctccgtgtctgggtctcctggacagtcgatcaccatctcctgcactggaaccagcagtgacgttggtggttataactatgtctcctggtaccaacagcacccaggcaaagcccccaaactcatgatttatgatgtcagtaatcggccctcaggggtttctaatcgcttctctggctccaagtctggcaacacggcctccctgaccatctctgggctccaggctgaggacgaggctgattattactgcagctcatatacaagcagcagcccccatgtggtatccggcggagggaccaagctgacggtcctagagcagaaactgatcagcgaggaagatctgaatcctggcggaggcggaggaagtggtggcggaggttctggtggcggtggatcaggcggtggcggatctggatctatggatatccagatgacccagtccccgagctccctgtccgcctctgtgggcgatagggtcaccatcacctgccgtgccagtcaggacatccgtaattatctgaactggtatcaacagaaaccaggaaaagctccgaaactactgatttactatacctcccgcctggagtctggagtcccttctcgcttctctggttctggttctgggacggattacactctgaccatcagcagtctgcaaccggaagacttcgcaacttattactgtcagcaaggtaatactctgccgtggacgttcggacagggcaccaaggtggagatcaaaggcggcggcggaagtggaggaggaggctcaggcggaggagggagcgaggttcagctggtggagtctggcggtggcctggtgcagccagggggctcactccgtttgtcctgtgcagcttctggctactcctttaccggctacactatgaactgggtgcgtcaggccccaggtaagggcctggaatgggttgcactgattaatcctaccaaaggtgttagtacctacaaccagaagttcaaggaccgtttcactataagcgtagataaatccaaaaacacagcctacctgcaaatgaacagcctgcgtgctgaggacactgccgtctattattgtgctagaagcggatactacggcgatagtgactggtattttgacgtgtggggtcaaggaaccctggtcaccgtctcctcgacatctggcggcggaggatctctggaatctggacaggtgctgctggaaagcaacatcaaggtgctgcccacctggtctaccccagttcagcctatggctctgattgtgcttggcggagttgccggcctgctgctctttatcggcctgggcatcttcttttgcgtgcggtgcagacatcggcggagacaggctgagagaatgagccagatcaagcggctgctgagcgagaagaaaacctgtcagtgccctcaccggttccagaaaacatgcagccccatc

SEQ ID NO: 611 - DNA, 1935 bp, Artificial Sequence
  Description of Artificial Sequence: Synthetic polynucleotide
atggctctgcctgtgacagctctgttgctgcctctggctctgctgctgcatgctgctagacctcaggtgcagctggtggagtctgggggaggcgtggtccagcctgggaggtccctgagactctcctgtgcagcctctggattcaccttcagtagctatggcatgcactgggtccgccaggctccaggcaaggggctggagtgggtggcagttatatcatatgatggaagtaataaatactatgcagactccgtgaagggccgattcaccatctccagagacaattccaagaacacgctgtatctgcaaatgaacagcctgagagctgaggacacggctgtgtattactgtgcgagagatggaacggactaccgaggtgcttttgatatctggggccaagggacaatggtcaccgtgtcttcagggtcaacctctggtagcggtaagcctggctccggcgaaggctccacaaagggtgacatccagttgacccagtctccagactccctggctgtgcctctgggcgagagggccaccatcaactgcaagtccagccagagtgttttatacagctccaacaataagaactacttagcttggtaccagcagaaaccaggacagcctcctaagctgctcatttactgggcatctacccgggaatccggggtccctgaccgattcagtggcagcgggtctgggacagatttcactctcaccatcagcagcctgcaggctgaagatgtggcagtttattactgtcagcaatattatagtactcctctgacgttcggccaagggaccaagctggagatcaaagagcagaaactgatcagcgaggaagatctgaatcctggcggaggcggaggaagtggtggcggaggttctggtggcggtggatcaggcggtggcggatctggatctatggatatccagatgacccagtccccgagctccctgtccgcctctgtgggcgatagggtcaccatcacctgccgtgccagtcaggacatccgtaattatctgaactggtatcaacagaaaccaggaaaagctccgaaactactgatttactatacctcccgcctggagtctggagtcccttctcgcttctctggttctggttctgggacggattacactctgaccatcagcagtctgcaaccggaagacttcgcaacttattactgtcagcaaggtaatactctgccgtggacgttcggacagggcaccaaggtggagatcaaaggcggcggcggaagtggaggaggaggctcaggcggaggagggagcgaggttcagctggtggagtctggcggtggcctggtgcagccagggggctcactccgtttgtcctgtgcagcttctggctactcctttaccggctacactatgaactgggtgcgtcaggccccaggtaagggcctggaatgggttgcactgattaatcctaccaaaggtgttagtacctacaaccagaagttcaaggaccgtttcactataagcgtagataaatccaaaaacacagcctacctgcaaatgaacagcctgcgtgctgaggacactgccgtctattattgtgctagaagcggatactacggcgatagtgactggtattttgacgtgtggggtcaaggaaccctggtcaccgtctcctcgacatctggcggcggaggatctctggaatctggacaggtgctgctggaaagcaacatcaaggtgctgcccacctggtctaccccagttcagcctatggctctgattgtgcttggcggagttgccggcctgctgctctttatcggcctgggcatcttcttttgcgtgcggtgcagacatcggcggagacaggctgagagaatgagccagatcaagcggctgctgagcgagaagaaaacctgtcagtgccctcaccggttccagaaaacatgcagccccatc

SEQ ID NO: 612 - DNA, 1935 bp, Artificial Sequence
  Description of Artificial Sequence: Synthetic polynucleotide
atggctctgcctgtgacagctctgttgctgcctctggctctgctgctgcatgctgctagacctgaggtgcagctggtgcagtctggggctgaggtgaagaagcctgggtcctcggtgagggtctcctgcaaggcttctggaggcaccttcagcagctatgctatcagctgggtgcgacaggcccctggacaagggcttgagtggatgggagggatcatccctatctttggtacagcaaactacgcacagaagttccagggcagagtcacgattaccgcggacaaatccacgagcacagcctacatggagctgagcagcctgaggagcgaggacacggccgtgtattactgtgcgagagggggcggaaggtggctacactcccgtctggacgtctggggccaagggaccacggtcaccgtgtcctcagggtcaacctctggtagcggtaagcctggctccggcgaaggctccacaaagggtcagtctgtgttgacgcagccgccctcagtgtctggggccccagggcagagggtcaccatctcctgcactgggagcagctccaacatcggggcaggttatgatgtacactggtatcagcagtttccaggaacagcccccaaactcctcatctttggtaacaacaatcggccctcaggggtccctgaccgattctctggctccaagtctggcacctcagcctccctggccatcactgggctccaggctgaggatgaggctaattattactgccagtcctatgacaggagcctgagtggtcccgtggtcttcggcggagggaccaagctgaccgtcctagagcagaaactgatcagcgaggaagatctgaatcctggcggaggcggaggaagtggtggcggaggttctggtggcggtggatcaggcggtggcggatctggatctatggatatccagatgacccagtccccgagctccctgtccgcctctgtgggcgatagggtcaccatcacctgccgtgccagtcaggacatccgtaattatctgaactggtatcaacagaaaccaggaaaagctccgaaactactgatttactatacctcccgcctggagtctggagtcccttctcgcttctctggttctggttctgggacggattacactctgaccatcagcagtctgcaaccggaagacttcgcaacttattactgtcagcaaggtaatactctgccgtggacgttcggacagggcaccaaggtggagatcaaaggcggcggcggaagtggaggaggaggctcaggcggaggagggagcgaggttcagctggtggagtctggcggtggcctggtgcagccagggggctcactccgtttgtcctgtgcagcttctggctactcctttaccggctacactatgaactgggtgcgtcaggccccaggtaagggcctggaatgggttgcactgattaatcctaccaaaggtgttagtacctacaaccagaagttcaaggaccgtttcactataagcgtagataaatccaaaaacacagcctacctgcaaatgaacagcctgcgtgctgaggacactgccgtctattattgtgctagaagcggatactacggcgatagtgactggtattttgacgtgtggggtcaaggaaccctggtcaccgtctcctcgacatctggcggcggaggatctctggaatctggacaggtgctgctggaaagcaacatcaaggtgctgcccacctggtctaccccagttcagcctatggctctgattgtgcttggcggagttgccggcctgctgctctttatcggcctgggcatcttcttttgcgtgcggtgcagacatcggcggagacaggctgagagaatgagccagatcaagcggctgctgagcgagaagaaaacctgtcagtgccctcaccggttccagaaaacatgcagccccatc

SEQ ID NO: 613 - DNA, 1932 bp, Artificial Sequence
  Description of Artificial Sequence: Synthetic polynucleotide
atggctctgcctgtgacagctctgttgctgcctctggctctgctgctgcatgctgctagacctgaggtgcagctggtggagtctgggggaggcgtggtccagcctgggaggtccctgagactctcctgtgcagcctctggattcaccttcagtagctatggcatgcactgggtccgccaggctccaggcaaggggctggagtgggtggcagttatatcatatgatggaagtaataaatactatgcagactccgtgaagggccgattcaccatctccagagacaattccaagaacacgctgtatctgcaaatgaacagcctgagagctgaggacacggctgtgtattactgtgcgaaagatgctggggacctgggtgcttttgatatctggggccaagggacaatggtcaccgtgtcttcagggtcaacctctggtagcggtaagcctggctccggcgaaggctccacaaagggtgacatcgtgatgacccagtctccagactccctggctgtgtctctgggcgagagggccaccatcaactgcaagtccagccagagtgttttatacagctccaacaataagaactacttagcttggtaccagcagaaaccaggacagcctcctaagctgctcatttactgggcatctacccgggaatccggggtccctgaccgattcagtggcagcgggtctgggacagatttcactctcaccatcagcagcctgcaggctgaagatgtggcagtttattactgtcagcaatattatagtactcctctcactttcggccctgggaccaaggtggaaatcaaagagcagaaactgatcagcgaggaagatctgaatcctggcggaggcggaggaagtggtggcggaggttctggtggcggtggatcaggcggtggcggatctggatctatggatatccagatgacccagtccccgagctccctgtccgcctctgtgggcgatagggtcaccatcacctgccgtgccagtcaggacatccgtaattatctgaactggtatcaacagaaaccaggaaaagctccgaaactactgatttactatacctcccgcctggagtctggagtcccttctcgcttctctggttctggttctgggacggattacactctgaccatcagcagtctgcaaccggaagacttcgcaacttattactgtcagcaaggtaatactctgccgtggacgttcggacagggcaccaaggtggagatcaaaggcggcggcggaagtggaggaggaggctcaggcggaggagggagcgaggttcagctggtggagtctggcggtggcctggtgcagccagggggctcactccgtttgtcctgtgcagcttctggctactcctttaccggctacactatgaactgggtgcgtcaggccccaggtaagggcctggaatgggttgcactgattaatcctaccaaaggtgttagtacctacaaccagaagttcaaggaccgtttcactataagcgtagataaatccaaaaacacagcctacctgcaaatgaacagcctgcgtgctgaggacactgccgtctattattgtgctagaagcggatactacggcgatagtgactggtattttgacgtgtggggtcaaggaaccctggtcaccgtctcctcgacatctggcggcggaggatctctggaatctggacaggtgctgctggaaagcaacatcaaggtgctgcccacctggtctaccccagttcagcctatggctctgattgtgcttggcggagttgccggcctgctgctctttatcggcctgggcatcttcttttgcgtgcggtgcagacatcggcggagacaggctgagagaatgagccagatcaagcggctgctgagcgagaagaaaacctgtcagtgccctcaccggttccagaaaacatgcagccccatc

SEQ ID NO: 614 - DNA, 1938 bp, Artificial Sequence
  Description of Artificial Sequence: Synthetic polynucleotide
atggctctgcctgtgacagctctgttgctgcctctggctctgctgctgcatgctgctagacctcaggtgcagctggtgcagtctgggggaggcgtggtccagcctgggaggtccctgagactctcctgtgcagcctctggattcaccttcagtagctatgctatgcactgggtccgccaggctccaggcaaggggctggagtgggtggcagttatatcatatgatggaagtaataaatactacgcagactccgtgaagggccgattcaccatctccagagacaattccaagaacacgctgtatctgcaaatgaacagcctgagagctgaggacacggctgtgtattactgtgcgagagggcgggtgtattactatgatagtagtggttatagctactggggccagggaaccctggtcaccgtgtcctcagggtcaacctctggtagcggtaagcctggctccggcgaaggctccacaaagggtcagtctgtgttgacgcagccgccctcagtgtctggggccccagggcagagggtcaccatctcctgcactgggagcagctccaacatcggggcaggttatgatgtacactggtaccagcagcttccaggaacagcccccaaactcctcatctatggtaacagcaatcggccctcaggggtccctgaccgattctctggctccaagtctggcacctcagcctccctggccatcactgggctccaggctgaggatgaggctgattattactgccagtcctatgacagcagcctgagtggccgggaggtcttcggaactgggaccaagctgaccgtcctagagcagaaactgatcagcgaggaagatctgaatcctggcggaggcggaggaagtggtggcggaggttctggtggcggtggatcaggcggtggcggatctggatctatggatatccagatgacccagtccccgagctccctgtccgcctctgtgggcgatagggtcaccatcacctgccgtgccagtcaggacatccgtaattatctgaactggtatcaacagaaaccaggaaaagctccgaaactactgatttactatacctcccgcctggagtctggagtcccttctcgcttctctggttctggttctgggacggattacactctgaccatcagcagtctgcaaccggaagacttcgcaacttattactgtcagcaaggtaatactctgccgtggacgttcggacagggcaccaaggtggagatcaaaggcggcggcggaagtggaggaggaggctcaggcggaggagggagcgaggttcagctggtggagtctggcggtggcctggtgcagccagggggctcactccgtttgtcctgtgcagcttctggctactcctttaccggctacactatgaactgggtgcgtcaggccccaggtaagggcctggaatgggttgcactgattaatcctaccaaaggtgttagtacctacaaccagaagttcaaggaccgtttcactataagcgtagataaatccaaaaacacagcctacctgcaaatgaacagcctgcgtgctgaggacactgccgtctattattgtgctagaagcggatactacggcgatagtgactggtattttgacgtgtggggtcaaggaaccctggtcaccgtctcctcgacatctggcggcggaggatctctggaatctggacaggtgctgctggaaagcaacatcaaggtgctgcccacctggtctaccccagttcagcctatggctctgattgtgcttggcggagttgccggcctgctgctctttatcggcctgggcatcttcttttgcgtgcggtgcagacatcggcggagacaggctgagagaatgagccagatcaagcggctgctgagcgagaagaaaacctgtcagtgccctcaccggttccagaaaacatgcagccccatc

SEQ ID NO: 615 - DNA, 1932 bp, Artificial Sequence
  Description of Artificial Sequence: Synthetic polynucleotide
atggctctgcctgtgacagctctgttgctgcctctggctctgctgctgcatgctgctagacctcaggtgcagctggtggagtctggggctgaggtgaagaagcctgggtcctcggtgaaggtctcctgcaaggcttctggaggcaccttcagcagctatgctatcagctgggtgcgacaggcccctggacaagggcttgagtggatgggagggatcatccctatctttggtacagcaaactacgcacagaagttccagggcagagtcacgattaccgcggacgaatccacgagcacagcctacatggagctgagcagcctgaggagcgaggacacggccgtgtattactgtgcgcgccccctgtatgcccctcgcttcggatacggtatggacgtctggggccaagggaccctggtcaccgtgtcctcagggtcaacctctggtagcggtaagcctggctccggcgaaggctccacaaagggtcagtctgtgttgacgcagccgccctcagcgtctgggacccccgggcagagggtcaccatctcttgttctggaagcagctccaacatcggaagtaattatgtatactggtaccagcagctcccaggaacggcccccaaactcctcatctataggaataatcagcggccctcaggggtccctgaccgattctctggctccaagtctggcacctcagcctccctggccatcagtgggctccggtccgaggatgaggctgattattactgtgcagcatgggatgacagcctgagtggttgggtgttcggcggaggcacccagctgaccgtcctcgagcagaaactgatcagcgaggaagatctgaatcctggcggaggcggaggaagtggtggcggaggttctggtggcggtggatcaggcggtggcggatctggatctatggatatccagatgacccagtccccgagctccctgtccgcctctgtgggcgatagggtcaccatcacctgccgtgccagtcaggacatccgtaattatctgaactggtatcaacagaaaccaggaaaagctccgaaactactgatttactatacctcccgcctggagtctggagtcccttctcgcttctctggttctggttctgggacggattacactctgaccatcagcagtctgcaaccggaagacttcgcaacttattactgtcagcaaggtaatactctgccgtggacgttcggacagggcaccaaggtggagatcaaaggcggcggcggaagtggaggaggaggctcaggcggaggagggagcgaggttcagctggtggagtctggcggtggcctggtgcagccagggggctcactccgtttgtcctgtgcagcttctggctactcctttaccggctacactatgaactgggtgcgtcaggccccaggtaagggcctggaatgggttgcactgattaatcctaccaaaggtgttagtacctacaaccagaagttcaaggaccgtttcactataagcgtagataaatccaaaaacacagcctacctgcaaatgaacagcctgcgtgctgaggacactgccgtctattattgtgctagaagcggatactacggcgatagtgactggtattttgacgtgtggggtcaaggaaccctggtcaccgtctcctcgacatctggcggcggaggatctctggaatctggacaggtgctgctggaaagcaacatcaaggtgctgcccacctggtctaccccagttcagcctatggctctgattgtgcttggcggagttgccggcctgctgctctttatcggcctgggcatcttcttttgcgtgcggtgcagacatcggcggagacaggctgagagaatgagccagatcaagcggctgctgagcgagaagaaaacctgtcagtgccctcaccggttccagaaaacatgcagccccatc

SEQ ID NO: 616 - DNA, 1923 bp, Artificial Sequence
  Description of Artificial Sequence: Synthetic polynucleotide
atggctctgcctgtgacagctctgttgctgcctctggctctgctgctgcatgctgctagacctgaggtgcagctgttggagtctgggggaggcttggtacagcctggggggtccctgagactctcctgtgcagcctctggattcacctttagcagctatgccatgagctgggtccgccaggctccagggaaggggctggagtgggtctcagctattagtggtagtggtggtagcacatactacgcagactccgtgaagggccggttcaccatctccagagacaattccaagaacacgctgtatctgcaaatgaacagcctgagagccgaggacacggccgtatattactgtgcgaaagatcgaggggggcagcggggttttgactactggggccagggaaccctggtcaccgtgtcctcagggtcaacctctggtagcggtaagcctggctccggcgaaggctccacaaagggtcagtctgtgctgactcagccaccctcagcgtctgggacccccgggcagagggtcaccatctcttgttctggaagcagctccaacatcggaagtaattatgtatactggtaccagcagctcccaggaacggcccccaaactcctcatctataggaataatcagcggccctcaggggtccctgaccgattctctggctccaagtctggcacctcagcctccctggccatcagtgggctccggtccgaggatgaggctgattattactgtgcagcatgggatgacagcctgagtggtctggtgttcggcggagggaccaagctgaccgtcctagagcagaaactgatcagcgaggaagatctgaatcctggcggaggcggaggaagtggtggcggaggttctggtggcggtggatcaggcggtggcggatctggatctatggatatccagatgacccagtccccgagctccctgtccgcctctgtgggcgatagggtcaccatcacctgccgtgccagtcaggacatccgtaattatctgaactggtatcaacagaaaccaggaaaagctccgaaactactgatttactatacctcccgcctggagtctggagtcccttctcgcttctctggttctggttctgggacggattacactctgaccatcagcagtctgcaaccggaagacttcgcaacttattactgtcagcaaggtaatactctgccgtggacgttcggacagggcaccaaggtggagatcaaaggcggcggcggaagtggaggaggaggctcaggcggaggagggagcgaggttcagctggtggagtctggcggtggcctggtgcagccagggggctcactccgtttgtcctgtgcagcttctggctactcctttaccggctacactatgaactgggtgcgtcaggccccaggtaagggcctggaatgggttgcactgattaatcctaccaaaggtgttagtacctacaaccagaagttcaaggaccgtttcactataagcgtagataaatccaaaaacacagcctacctgcaaatgaacagcctgcgtgctgaggacactgccgtctattattgtgctagaagcggatactacggcgatagtgactggtattttgacgtgtggggtcaaggaaccctggtcaccgtctcctcgacatctggcggcggaggatctctggaatctggacaggtgctgctggaaagcaacatcaaggtgctgcccacctggtctaccccagttcagcctatggctctgattgtgcttggcggagttgccggcctgctgctctttatcggcctgggcatcttcttttgcgtgcggtgcagacatcggcggagacaggctgagagaatgagccagatcaagcggctgctgagcgagaagaaaacctgtcagtgccctcaccggttccagaaaacatgcagccccatc

SEQ ID NO: 617 - DNA, 1899 bp, Artificial Sequence
  Description of Artificial Sequence: Synthetic polynucleotide
atggctctgcctgtgacagctctgttgctgcctctggctctgctgctgcatgctgctagacctgaggtgaagctggtggagagcggcggcggcctggtgcagcccggcggcagcctgaagctgagctgcaccaccagcggcttcaccttcagcagctacggcctgagctggatcaggcagacccccgacaagaggctggagctggtggccagcatcaacaggaacggcgacaacacctactacaccgacagcgtgaagggcaggttcaccatcagcaggcacgacgccaagaacaccctgaacctgcagatgaacagcctgaagagcgaggacaccgccatgtactactgcaccaggggcggcttcagctactggggccagggcaccctggtgaccgtgagcgccggcagcaccagcggcagcggcaagcccggcagcggcgagggcagcaccaagggcgacatcgtgctgacccagagccccgccatcatgagcagcagccccggcgagaaggtgaccatgacctgcagcgccagcagcagcgtgagctacatgtactggtaccagcagaggcccggcagcagccccaggctgctgatctacgacaccagcaagctggccagcggcgtgcccgtgaggttcagcggcagcgtgagcggcaccagctacagcctgaccatcagcaggatggagagcgaggacgccgccacctactactgccagcagtggagcggcttcccccccatcaccttcggcgccggcaccaagctggagctgaaggagcagaaactgatcagcgaggaagatctgaatcctggcggaggcggaggaagtggtggcggaggttctggtggcggtggatcaggcggtggcggatctggatctatggatatccagatgacccagtccccgagctccctgtccgcctctgtgggcgatagggtcaccatcacctgccgtgccagtcaggacatccgtaattatctgaactggtatcaacagaaaccaggaaaagctccgaaactactgatttactatacctcccgcctggagtctggagtcccttctcgcttctctggttctggttctgggacggattacactctgaccatcagcagtctgcaaccggaagacttcgcaacttattactgtcagcaaggtaatactctgccgtggacgttcggacagggcaccaaggtggagatcaaaggcggcggcggaagtggaggaggaggctcaggcggaggagggagcgaggttcagctggtggagtctggcggtggcctggtgcagccagggggctcactccgtttgtcctgtgcagcttctggctactcctttaccggctacactatgaactgggtgcgtcaggccccaggtaagggcctggaatgggttgcactgattaatcctaccaaaggtgttagtacctacaaccagaagttcaaggaccgtttcactataagcgtagataaatccaaaaacacagcctacctgcaaatgaacagcctgcgtgctgaggacactgccgtctattattgtgctagaagcggatactacggcgatagtgactggtattttgacgtgtggggtcaaggaaccctggtcaccgtctcctcgacatctggcggcggaggatctctggaatctggacaggtgctgctggaaagcaacatcaaggtgctgcccacctggtctaccccagttcagcctatggctctgattgtgcttggcggagttgccggcctgctgctctttatcggcctgggcatcttcttttgcgtgcggtgcagacatcggcggagacaggctgagagaatgagccagatcaagcggctgctgagcgagaagaaaacctgtcagtgccctcaccggttccagaaaacatgcagccccatc

SEQ ID NO: 618 - DNA, 1899 bp, Artificial Sequence
  Description of Artificial Sequence: Synthetic polynucleotide
atggctctgcctgtgacagctctgttgctgcctctggctctgctgctgcatgctgctagacctgaggtgaagctggtggagagcggcggcggcctggtgcagcccggcggcagcctgaagctgagctgcaccaccagcggcttcaccttcagcagctacggcctgagctggatcaggcagacccccgacaagaggctggagctggtggccagcatcaacaggaacggcgacaacacctactacaccgacagcgtgaggggcaggttcaccatcagcagggacaacgccaagaacaccctgaacctgcagatgagcagcctgaagagcgaggacaccgccatgtactactgcaccaggggcggcttcagctactggggccagggcaccctggtgaccgtgagcgccggcagcaccagcggcagcggcaagcccggcagcggcgagggcagcaccaagggcgacatcgtgctgacccagagccccgccaccatgagcgccagccccggcgagaaggtgaccctgacctgcagcgccagccccggcgtgacctacatgtactggtaccagcagaagcccggcagcagccccaggctgctgatctacgacaccagcaacctggccagcggcgtgcccctgaggttcagcggcagcggcagcggcaccagctacagcctgaccatcagcaggaccgaggccgaggacgccgccacctactactgccagcagtggagcggctacccccccatcaccttcggcgccggcaccaagctggagctgagggagcagaaactgatcagcgaggaagatctgaatcctggcggaggcggaggaagtggtggcggaggttctggtggcggtggatcaggcggtggcggatctggatctatggatatccagatgacccagtccccgagctccctgtccgcctctgtgggcgatagggtcaccatcacctgccgtgccagtcaggacatccgtaattatctgaactggtatcaacagaaaccaggaaaagctccgaaactactgatttactatacctcccgcctggagtctggagtcccttctcgcttctctggttctggttctgggacggattacactctgaccatcagcagtctgcaaccggaagacttcgcaacttattactgtcagcaaggtaatactctgccgtggacgttcggacagggcaccaaggtggagatcaaaggcggcggcggaagtggaggaggaggctcaggcggaggagggagcgaggttcagctggtggagtctggcggtggcctggtgcagccagggggctcactccgtttgtcctgtgcagcttctggctactcctttaccggctacactatgaactgggtgcgtcaggccccaggtaagggcctggaatgggttgcactgattaatcctaccaaaggtgttagtacctacaaccagaagttcaaggaccgtttcactataagcgtagataaatccaaaaacacagcctacctgcaaatgaacagcctgcgtgctgaggacactgccgtctattattgtgctagaagcggatactacggcgatagtgactggtattttgacgtgtggggtcaaggaaccctggtcaccgtctcctcgacatctggcggcggaggatctctggaatctggacaggtgctgctggaaagcaacatcaaggtgctgcccacctggtctaccccagttcagcctatggctctgattgtgcttggcggagttgccggcctgctgctctttatcggcctgggcatcttcttttgcgtgcggtgcagacatcggcggagacaggctgagagaatgagccagatcaagcggctgctgagcgagaagaaaacctgtcagtgccctcaccggttccagaaaacatgcagccccatc

SEQ ID NO: 619 - DNA, 1899 bp, Artificial Sequence
  Description of Artificial Sequence: Synthetic polynucleotide
atggctctgcctgtgacagctctgttgctgcctctggctctgctgctgcatgctgctagacctgaggtgaagctggtggagagcggcggcggcctggtgcagcccggcggcagcctgaagctgagctgcaccaccagcggcttcaccttcagcagctacggcctgagctggatcaggcagacccccgacaagaggctggagctggtggccagcatcaacaggaacggcgacaacgcctactacatcgacagcgtgaagggcaggttcaccatcagcagggacaacgccaagaacgccctgaacctgcagatgagcagcctgaagagcgaggacaccgccatgtactactgcaccaggggcggcttcagccactggggccagggcaccctggtgaccgtggccgccggcagcaccagcggcagcggcaagcccggcagcggcgagggcagcaccaagggccagatcgtgctgacccagagccccgccatcatgagcgccagccccggcgagaaggtgaccatgacctgcagcgccagcagcagcgtgagctacatgtactggtaccagcagaagcccggcagcagccccaggctgctgatctacgacaccagcaacctggccagcggcgtgcccgtgaggttcagcggcagcggcagcggcaccagctacagcctgatcatcagcaggatggaggccgaggacgccgccacctactactgccagcagtggagcggctacccccccatcaccttcggcgccggcaccaagctggagctgaaggagcagaaactgatcagcgaggaagatctgaatcctggcggaggcggaggaagtggtggcggaggttctggtggcggtggatcaggcggtggcggatctggatctatggatatccagatgacccagtccccgagctccctgtccgcctctgtgggcgatagggtcaccatcacctgccgtgccagtcaggacatccgtaattatctgaactggtatcaacagaaaccaggaaaagctccgaaactactgatttactatacctcccgcctggagtctggagtcccttctcgcttctctggttctggttctgggacggattacactctgaccatcagcagtctgcaaccggaagacttcgcaacttattactgtcagcaaggtaatactctgccgtggacgttcggacagggcaccaaggtggagatcaaaggcggcggcggaagtggaggaggaggctcaggcggaggagggagcgaggttcagctggtggagtctggcggtggcctggtgcagccagggggctcactccgtttgtcctgtgcagcttctggctactcctttaccggctacactatgaactgggtgcgtcaggccccaggtaagggcctggaatgggttgcactgattaatcctaccaaaggtgttagtacctacaaccagaagttcaaggaccgtttcactataagcgtagataaatccaaaaacacagcctacctgcaaatgaacagcctgcgtgctgaggacactgccgtctattattgtgctagaagcggatactacggcgatagtgactggtattttgacgtgtggggtcaaggaaccctggtcaccgtctcctcgacatctggcggcggaggatctctggaatctggacaggtgctgctggaaagcaacatcaaggtgctgcccacctggtctaccccagttcagcctatggctctgattgtgcttggcggagttgccggcctgctgctctttatcggcctgggcatcttcttttgcgtgcggtgcagacatcggcggagacaggctgagagaatgagccagatcaagcggctgctgagcgagaagaaaacctgtcagtgccctcaccggttccagaaaacatgcagccccatc

SEQ ID NO: 620 - DNA, 1899 bp, Artificial Sequence
  Description of Artificial Sequence: Synthetic polynucleotide
atggctctgcctgtgacagctctgttgctgcctctggctctgctgctgcatgctgctagacctgaggtgaagctggtggagagcggcggcggcctggtgcagcccggcggcagcctgaagctgagctgcgccgccagcggcttcaccttcagcagctacggcctgagctgggtgaggcagacccccgacaagggcctggagctggtggccagcatcaacaggaacggcggcaacacctactacaccgacagcgtgaagggcaggttcaccatcagcagggacaacgccaagaacaccctgaacctgcagatgagcagcctgaagagcgaggacaccgccatgtactactgcgccaggggcggcttcacctactggggccagggcaccctggtgaccgtgagcgccggcagcaccagcggcagcggcaagcccggcagcggcgagggcagcaccaagggccagatcgtgctgacccagagccccgccatcatgagcgccttccccggcgagaaggtgaccatgacctgcagcgccagcagcagcgtgggctacatgtactggtaccagcagaagcccggcagcagccccaggctgctgatctacgacaccagcaacctggccagcggcgtgcccgtgaggttcagcggcagcggcagcggcaccgcctacagcctgaccatcagcaggatggaggccgaggacgccgccacctactactgccagcagtggagcggctacccccccatcaccttcggcgccggcaccaagctggagctgaaggagcagaaactgatcagcgaggaagatctgaatcctggcggaggcggaggaagtggtggcggaggttctggtggcggtggatcaggcggtggcggatctggatctatggatatccagatgacccagtccccgagctccctgtccgcctctgtgggcgatagggtcaccatcacctgccgtgccagtcaggacatccgtaattatctgaactggtatcaacagaaaccaggaaaagctccgaaactactgatttactatacctcccgcctggagtctggagtcccttctcgcttctctggttctggttctgggacggattacactctgaccatcagcagtctgcaaccggaagacttcgcaacttattactgtcagcaaggtaatactctgccgtggacgttcggacagggcaccaaggtggagatcaaaggcggcggcggaagtggaggaggaggctcaggcggaggagggagcgaggttcagctggtggagtctggcggtggcctggtgcagccagggggctcactccgtttgtcctgtgcagcttctggctactcctttaccggctacactatgaactgggtgcgtcaggccccaggtaagggcctggaatgggttgcactgattaatcctaccaaaggtgttagtacctacaaccagaagttcaaggaccgtttcactataagcgtagataaatccaaaaacacagcctacctgcaaatgaacagcctgcgtgctgaggacactgccgtctattattgtgctagaagcggatactacggcgatagtgactggtattttgacgtgtggggtcaaggaaccctggtcaccgtctcctcgacatctggcggcggaggatctctggaatctggacaggtgctgctggaaagcaacatcaaggtgctgcccacctggtctaccccagttcagcctatggctctgattgtgcttggcggagttgccggcctgctgctctttatcggcctgggcatcttcttttgcgtgcggtgcagacatcggcggagacaggctgagagaatgagccagatcaagcggctgctgagcgagaagaaaacctgtcagtgccctcaccggttccagaaaacatgcagccccatc

SEQ ID NO: 621 - DNA, 1899 bp, Artificial Sequence
  Description of Artificial Sequence: Synthetic polynucleotide
atggctctgcctgtgacagctctgttgctgcctctggctctgctgctgcatgctgctagacctcaggtgcagctgaaggagagcggcggcggcctggtgaggcccggcggcagcctgaagctgagctgcgccgccagcggcttcaccttcagcaactacggcatgagctggatcaggcagacccccgacaagaacctggagctggtggccagcatcaacaccagcggcggcaacacctactaccccgacagcgtgaagggcaggttcaccatcagcagggacaacgccagggccaccctgaacctgcagatgagcaacctgaagagcgaggacaccgccatctactactgcaccaggggcggcttcacccactggggccagggcaccctggtggccgtgagcgccggcagcaccagcggcagcggcaagcccggcagcggcgagggcagcaccaagggccagatcgtgctgacccagagccccgccatcatgagcgccagccccggcgagaaggtgaccatgacctgcagcgccagcagcagcgtgagctacatgtactggtaccagcagaagcccggcagcagccccaggctgctgatctacgacaccagcaacctggccagcggcgtgcccgtgaggttcagcggcagcggcagcggcaccagctacttcctgaccatcagcaggatggaggccgaggacgccgccacctactactgccagcagtggaccggctacccccccatcaccttcggcgccggcaccaagctggagctgagggagcagaaactgatcagcgaggaagatctgaatcctggcggaggcggaggaagtggtggcggaggttctggtggcggtggatcaggcggtggcggatctggatctatggatatccagatgacccagtccccgagctccctgtccgcctctgtgggcgatagggtcaccatcacctgccgtgccagtcaggacatccgtaattatctgaactggtatcaacagaaaccaggaaaagctccgaaactactgatttactatacctcccgcctggagtctggagtcccttctcgcttctctggttctggttctgggacggattacactctgaccatcagcagtctgcaaccggaagacttcgcaacttattactgtcagcaaggtaatactctgccgtggacgttcggacagggcaccaaggtggagatcaaaggcggcggcggaagtggaggaggaggctcaggcggaggagggagcgaggttcagctggtggagtctggcggtggcctggtgcagccagggggctcactccgtttgtcctgtgcagcttctggctactcctttaccggctacactatgaactgggtgcgtcaggccccaggtaagggcctggaatgggttgcactgattaatcctaccaaaggtgttagtacctacaaccagaagttcaaggaccgtttcactataagcgtagataaatccaaaaacacagcctacctgcaaatgaacagcctgcgtgctgaggacactgccgtctattattgtgctagaagcggatactacggcgatagtgactggtattttgacgtgtggggtcaaggaaccctggtcaccgtctcctcgacatctggcggcggaggatctctggaatctggacaggtgctgctggaaagcaacatcaaggtgctgcccacctggtctaccccagttcagcctatggctctgattgtgcttggcggagttgccggcctgctgctctttatcggcctgggcatcttcttttgcgtgcggtgcagacatcggcggagacaggctgagagaatgagccagatcaagcggctgctgagcgagaagaaaacctgtcagtgccctcaccggttccagaaaacatgcagccccatc

SEQ ID NO: 622 - DNA, 1899 bp, Artificial Sequence
  Description of Artificial Sequence: Synthetic polynucleotide
atggctctgcctgtgacagctctgttgctgcctctggctctgctgctgcatgctgctagacctcaggtgcagctgaaggagagcggcggcggcctggtgcagcccggcggcagcctgaagctgagctgcgccgccagcggcttccccttcagcagctacggcctgagctgggtgaggcagacccccgacaagaggctggagctggtggccaccatcaacaggaacggcgacagcgcctactaccccgacagcgtgaagggcaggttcaccatcagcagggacgacgccaagaacaccctgtacctgcagatgagcagcctgaagagcgaggacaccgccatgtactactgcaccaggggcggcttcgcctactggggccagggcaccctggtgaccgtgagcgccggcagcaccagcggcagcggcaagcccggcagcggcgagggcagcaccaagggccagatcgtgctgacccagagccccgccatcatgagcgccagccccggcgagaaggtgaccatgacctgcagcggcagcagcagcgtgggctacatgtactggtaccagcagaagcccggcttcagccccaggctgctgatctacgacaccagcaacctggccagcggcgtgcccgtgaggttcagcggcagcggcagcggcaccagctacagcctgaccatcagcaggatggaggccgaggacgccgccacctactactgccagcagtggagcggctacccccccatcaccttcggcgccggcaccaagctggagctgaaggagcagaaactgatcagcgaggaagatctgaatcctggcggaggcggaggaagtggtggcggaggttctggtggcggtggatcaggcggtggcggatctggatctatggatatccagatgacccagtccccgagctccctgtccgcctctgtgggcgatagggtcaccatcacctgccgtgccagtcaggacatccgtaattatctgaactggtatcaacagaaaccaggaaaagctccgaaactactgatttactatacctcccgcctggagtctggagtcccttctcgcttctctggttctggttctgggacggattacactctgaccatcagcagtctgcaaccggaagacttcgcaacttattactgtcagcaaggtaatactctgccgtggacgttcggacagggcaccaaggtggagatcaaaggcggcggcggaagtggaggaggaggctcaggcggaggagggagcgaggttcagctggtggagtctggcggtggcctggtgcagccagggggctcactccgtttgtcctgtgcagcttctggctactcctttaccggctacactatgaactgggtgcgtcaggccccaggtaagggcctggaatgggttgcactgattaatcctaccaaaggtgttagtacctacaaccagaagttcaaggaccgtttcactataagcgtagataaatccaaaaacacagcctacctgcaaatgaacagcctgcgtgctgaggacactgccgtctattattgtgctagaagcggatactacggcgatagtgactggtattttgacgtgtggggtcaaggaaccctggtcaccgtctcctcgacatctggcggcggaggatctctggaatctggacaggtgctgctggaaagcaacatcaaggtgctgcccacctggtctaccccagttcagcctatggctctgattgtgcttggcggagttgccggcctgctgctctttatcggcctgggcatcttcttttgcgtgcggtgcagacatcggcggagacaggctgagagaatgagccagatcaagcggctgctgagcgagaagaaaacctgtcagtgccctcaccggttccagaaaacatgcagccccatc

SEQ ID NO: 623 - DNA, 1899 bp, Artificial Sequence
  Description of Artificial Sequence: Synthetic polynucleotide
atggctctgcctgtgacagctctgttgctgcctctggctctgctgctgcatgctgctagacctgaggtgaagctggtggagagcggcggcggcctggtgaggcccggcggcagcctgaagctgagctgcgccgccagcggcttcaccttcagcaactacggcatgagctggatcaggcagacccccgacaagaacctggagctggtggccagcatcaacaccagcggcggcaacacctactaccccgacagcgtgaagggcaggttcaccatcagcagggacaacgccagggccaccctgaacctgcagatgagcaacctgaagagcgaggacaccgccatctactactgcaccaggggcggcttcacccactggggccagggcaccctggtgaccgtgagcgccggcagcaccagcggcagcggcaagcccggcagcggcgagggcagcaccaagggcgacatcgtgctgacccagagccccgccatcatgagcgccagccccggcgagaaggtgaccatgacctgcagcgccagcagcagcgtggccttcatgtactggtaccagcagaagcccggcagcagccccaggctgctgatctacgacaccagcaagctggccagcggcgtgcccgtgaggttcagcggcagcggcagcggcaccagctacagcctgaccatcagcaggatggaggccgaggacgccgccacctactactgccagcagtggagcggctacccccccatcaccttcggcgccggcaccaagctggagctgaaggagcagaaactgatcagcgaggaagatctgaatcctggcggaggcggaggaagtggtggcggaggttctggtggcggtggatcaggcggtggcggatctggatctatggatatccagatgacccagtccccgagctccctgtccgcctctgtgggcgatagggtcaccatcacctgccgtgccagtcaggacatccgtaattatctgaactggtatcaacagaaaccaggaaaagctccgaaactactgatttactatacctcccgcctggagtctggagtcccttctcgcttctctggttctggttctgggacggattacactctgaccatcagcagtctgcaaccggaagacttcgcaacttattactgtcagcaaggtaatactctgccgtggacgttcggacagggcaccaaggtggagatcaaaggcggcggcggaagtggaggaggaggctcaggcggaggagggagcgaggttcagctggtggagtctggcggtggcctggtgcagccagggggctcactccgtttgtcctgtgcagcttctggctactcctttaccggctacactatgaactgggtgcgtcaggccccaggtaagggcctggaatgggttgcactgattaatcctaccaaaggtgttagtacctacaaccagaagttcaaggaccgtttcactataagcgtagataaatccaaaaacacagcctacctgcaaatgaacagcctgcgtgctgaggacactgccgtctattattgtgctagaagcggatactacggcgatagtgactggtattttgacgtgtggggtcaaggaaccctggtcaccgtctcctcgacatctggcggcggaggatctctggaatctggacaggtgctgctggaaagcaacatcaaggtgctgcccacctggtctaccccagttcagcctatggctctgattgtgcttggcggagttgccggcctgctgctctttatcggcctgggcatcttcttttgcgtgcggtgcagacatcggcggagacaggctgagagaatgagccagatcaagcggctgctgagcgagaagaaaacctgtcagtgccctcaccggttccagaaaacatgcagccccatc

SEQ ID NO: 624 - DNA, 1899 bp, Artificial Sequence
  Description of Artificial Sequence: Synthetic polynucleotide
atggctctgcctgtgacagctctgttgctgcctctggctctgctgctgcatgctgctagacctcaggtgcagctgaaggagagcggcggcggcctggtgcagcccggcggcagcctgaagctgagctgcaccaccagcggcttcaccttcagcagctacggcctgagctggatcaggcagacccccgacaagaggctggagctggtggccagcatcaacaggaacggcgacaacacctactacaccgacagcgtgaggggcaggttcaccatcagcagggacaacgccaagagcaccctgaacctgcagatgagcagcctgaagagcgaggacaccgccatgtactactgcaccaggggcggcttcagctactggggccagggcaccctggtgaccgtgagcgccggcagcaccagcggcagcggcaagcccggcagcggcgagggcagcaccaagggccagatcgtgctgacccagagcccccccctgatgagcgccagccccggcgagaaggtgaccatgacctgcagcgccagcagcagcgtgggctacatgtactggttccagcagaggcccggcagcagccccaggctgctgatctacgacacctacaacctggccagcggcgtgcccgtgaggttcagcggcagcggcagcggcaccagctacagcctgaccatcagcaggctggaggccgaggacgccgccacctactactgccagcagtggagcggctacccccccatcaccttcggcgccggcaccaagctggagctgagggagcagaaactgatcagcgaggaagatctgaatcctggcggaggcggaggaagtggtggcggaggttctggtggcggtggatcaggcggtggcggatctggatctatggatatccagatgacccagtccccgagctccctgtccgcctctgtgggcgatagggtcaccatcacctgccgtgccagtcaggacatccgtaattatctgaactggtatcaacagaaaccaggaaaagctccgaaactactgatttactatacctcccgcctggagtctggagtcccttctcgcttctctggttctggttctgggacggattacactctgaccatcagcagtctgcaaccggaagacttcgcaacttattactgtcagcaaggtaatactctgccgtggacgttcggacagggcaccaaggtggagatcaaaggcggcggcggaagtggaggaggaggctcaggcggaggagggagcgaggttcagctggtggagtctggcggtggcctggtgcagccagggggctcactccgtttgtcctgtgcagcttctggctactcctttaccggctacactatgaactgggtgcgtcaggccccaggtaagggcctggaatgggttgcactgattaatcctaccaaaggtgttagtacctacaaccagaagttcaaggaccgtttcactataagcgtagataaatccaaaaacacagcctacctgcaaatgaacagcctgcgtgctgaggacactgccgtctattattgtgctagaagcggatactacggcgatagtgactggtattttgacgtgtggggtcaaggaaccctggtcaccgtctcctcgacatctggcggcggaggatctctggaatctggacaggtgctgctggaaagcaacatcaaggtgctgcccacctggtctaccccagttcagcctatggctctgattgtgcttggcggagttgccggcctgctgctctttatcggcctgggcatcttcttttgcgtgcggtgcagacatcggcggagacaggctgagagaatgagccagatcaagcggctgctgagcgagaagaaaacctgtcagtgccctcaccggttccagaaaacatgcagccccatc

SEQ ID NO: 625 - DNA, 1899 bp, Artificial Sequence
  Description of Artificial Sequence: Synthetic polynucleotide
atggctctgcctgtgacagctctgttgctgcctctggctctgctgctgcatgctgctagacctgaggtgaagctggtggagagcggcggcggcctggtgcagcccggcggcagcctgaagctgagctgcgccgccagcggcttcaccttcagcagctacggcctgagctgggtgaggcagacccccgacaagaggctggagctggtggccagcgtgaacaggaacggcggcaacacctactacaccgacagcgtgaagggcaggttcaccatcagcagggacaacgccaagaacaccctgaacctgcagatgagcagcctgaagagcgaggacaccgccatgtactactgcgccaggggcggcttcacctactggggccagggcaccctggtgaccgtgagcgccggcagcaccagcggcagcggcaagcccggcagcggcgagggcagcaccaagggccagatcgtgctgacccagagccccgccatcatgagcgccagccccggcgagaaggtgaccatgacctgcagcgccagcagcagcgtgggctacatgtactggtaccagcagaagcccggcagcagccccaggctgctgatctacgacaccagccacctggccagcggcgtgcccgtgaggttcagcggcagcggcagcggcaccagctacagcctgaccatcagcaggatggaggccgaggacgccgccacctactactgccagcagtggagcggctacccccccatcaccttcggcgccggcaccaagctggagctgaaggagcagaaactgatcagcgaggaagatctgaatcctggcggaggcggaggaagtggtggcggaggttctggtggcggtggatcaggcggtggcggatctggatctatggatatccagatgacccagtccccgagctccctgtccgcctctgtgggcgatagggtcaccatcacctgccgtgccagtcaggacatccgtaattatctgaactggtatcaacagaaaccaggaaaagctccgaaactactgatttactatacctcccgcctggagtctggagtcccttctcgcttctctggttctggttctgggacggattacactctgaccatcagcagtctgcaaccggaagacttcgcaacttattactgtcagcaaggtaatactctgccgtggacgttcggacagggcaccaaggtggagatcaaaggcggcggcggaagtggaggaggaggctcaggcggaggagggagcgaggttcagctggtggagtctggcggtggcctggtgcagccagggggctcactccgtttgtcctgtgcagcttctggctactcctttaccggctacactatgaactgggtgcgtcaggccccaggtaagggcctggaatgggttgcactgattaatcctaccaaaggtgttagtacctacaaccagaagttcaaggaccgtttcactataagcgtagataaatccaaaaacacagcctacctgcaaatgaacagcctgcgtgctgaggacactgccgtctattattgtgctagaagcggatactacggcgatagtgactggtattttgacgtgtggggtcaaggaaccctggtcaccgtctcctcgacatctggcggcggaggatctctggaatctggacaggtgctgctggaaagcaacatcaaggtgctgcccacctggtctaccccagttcagcctatggctctgattgtgcttggcggagttgccggcctgctgctctttatcggcctgggcatcttcttttgcgtgcggtgcagacatcggcggagacaggctgagagaatgagccagatcaagcggctgctgagcgagaagaaaacctgtcagtgccctcaccggttccagaaaacatgcagccccatc

SEQ ID NO: 626 - DNA, 1899 bp, Artificial Sequence
  Description of Artificial Sequence: Synthetic polynucleotide
atggctctgcctgtgacagctctgttgctgcctctggctctgctgctgcatgctgctagacctgaggtgaagctggtggagagcggcggcggcctggtgcagcccggcggcagcctgaagctgagctgcgccgccagcggcttccccttcagcagctacggcctgagctgggtgaggcagacccccgacaagaggctggagctggtggccaccatcaacaggaacggcgacagcgcctactaccccgacagcgtgaagggcaggttcaccatcagcagggacgacgccaagaacaccctgtacctgcagatgagcagcctgaagagcgaggacaccgccatgtactactgcaccaggggcggcttcgcctactggggccagggcaccctggtgaccgtgagcgccggcagcaccagcggcagcggcaagcccggcagcggcgagggcagcaccaagggccagatcgtgctgacccagagccccgtgatcatgagcgccagccccggcgagaaggtgaccatgacctgcagcgccagcagcagcgtgggctacatgtactggtaccagcagaggcccggcagcagccccaggctgctgatctacgacaccagcaacctggccagcggcgcccccgtgaggttcagcggcagcggcagcggcaccagctacagcctgaccatcagcaggatggaggccgaggacgccgccacctactactgccagcagtggagcggctacccccccatcaccttcggcgccggcaccaagctggagctgaaggagcagaaactgatcagcgaggaagatctgaatcctggcggaggcggaggaagtggtggcggaggttctggtggcggtggatcaggcggtggcggatctggatctatggatatccagatgacccagtccccgagctccctgtccgcctctgtgggcgatagggtcaccatcacctgccgtgccagtcaggacatccgtaattatctgaactggtatcaacagaaaccaggaaaagctccgaaactactgatttactatacctcccgcctggagtctggagtcccttctcgcttctctggttctggttctgggacggattacactctgaccatcagcagtctgcaaccggaagacttcgcaacttattactgtcagcaaggtaatactctgccgtggacgttcggacagggcaccaaggtggagatcaaaggcggcggcggaagtggaggaggaggctcaggcggaggagggagcgaggttcagctggtggagtctggcggtggcctggtgcagccagggggctcactccgtttgtcctgtgcagcttctggctactcctttaccggctacactatgaactgggtgcgtcaggccccaggtaagggcctggaatgggttgcactgattaatcctaccaaaggtgttagtacctacaaccagaagttcaaggaccgtttcactataagcgtagataaatccaaaaacacagcctacctgcaaatgaacagcctgcgtgctgaggacactgccgtctattattgtgctagaagcggatactacggcgatagtgactggtattttgacgtgtggggtcaaggaaccctggtcaccgtctcctcgacatctggcggcggaggatctctggaatctggacaggtgctgctggaaagcaacatcaaggtgctgcccacctggtctaccccagttcagcctatggctctgattgtgcttggcggagttgccggcctgctgctctttatcggcctgggcatcttcttttgcgtgcggtgcagacatcggcggagacaggctgagagaatgagccagatcaagcggctgctgagcgagaagaaaacctgtcagtgccctcaccggttccagaaaacatgcagccccatc

SEQ ID NO: 627 - DNA, 1899 bp, Artificial Sequence
  Description of Artificial Sequence: Synthetic polynucleotide
atggctctgcctgtgacagctctgttgctgcctctggctctgctgctgcatgctgctagacctgaggtgaagctggtggagagcggcggcggcctggtgcagcccggcggcagcctgaagctgagctgcaccaccagcggcttcaccttcagcagctacggcctgagctggatcaggcagacccccgacaagaggctggagctggtggccagcatcaacaggaacggcgacaacacctactacaccgacagcgtgaagggcaggttcaccatcagcagggacaacgccaagaacaccctgaacctgcagatgagcagcctgaagagcgaggacaccgccatgtactactgcaccaggggcggcttcagctactggggccagggcaccctggtgaccgtgagcgccggcagcaccagcggcagcggcaagcccggcagcggcgagggcagcaccaagggccagatcgtgctgacccagagccccgccatcatgagcgccagccccggcgagaaggtgaccatgacctgcagcgccagcagcagcgtgagctacatgtactggtaccagcagaagcccggcagcagccccaggctgctgatctacgacaccagcaacctggccagcggcgtgcccgtgaggttcagcggcagcggcagcggcaccagctacagcctgaccatcagcaggatggaggccgaggacgccgccacctactactgccagcagtggaccggctacccccccatcaccttcggcgccggcaccaagctggagctgaaggagcagaaactgatcagcgaggaagatctgaatcctggcggaggcggaggaagtggtggcggaggttctggtggcggtggatcaggcggtggcggatctggatctatggatatccagatgacccagtccccgagctccctgtccgcctctgtgggcgatagggtcaccatcacctgccgtgccagtcaggacatccgtaattatctgaactggtatcaacagaaaccaggaaaagctccgaaactactgatttactatacctcccgcctggagtctggagtcccttctcgcttctctggttctggttctgggacggattacactctgaccatcagcagtctgcaaccggaagacttcgcaacttattactgtcagcaaggtaatactctgccgtggacgttcggacagggcaccaaggtggagatcaaaggcggcggcggaagtggaggaggaggctcaggcggaggagggagcgaggttcagctggtggagtctggcggtggcctggtgcagccagggggctcactccgtttgtcctgtgcagcttctggctactcctttaccggctacactatgaactgggtgcgtcaggccccaggtaagggcctggaatgggttgcactgattaatcctaccaaaggtgttagtacctacaaccagaagttcaaggaccgtttcactataagcgtagataaatccaaaaacacagcctacctgcaaatgaacagcctgcgtgctgaggacactgccgtctattattgtgctagaagcggatactacggcgatagtgactggtattttgacgtgtggggtcaaggaaccctggtcaccgtctcctcgacatctggcggcggaggatctctggaatctggacaggtgctgctggaaagcaacatcaaggtgctgcccacctggtctaccccagttcagcctatggctctgattgtgcttggcggagttgccggcctgctgctctttatcggcctgggcatcttcttttgcgtgcggtgcagacatcggcggagacaggctgagagaatgagccagatcaagcggctgctgagcgagaagaaaacctgtcagtgccctcaccggttccagaaaacatgcagccccatc

SEQ ID NO: 628 - DNA, 1899 bp, Artificial Sequence
  Description of Artificial Sequence: Synthetic polynucleotide
atggctctgcctgtgacagctctgttgctgcctctggctctgctgctgcatgctgctagacctgaggtgaagctggtggagagcggcggcgtgctggtgcagcccggcggcagcctgaagctgagctgcgccgccagcggcttcaccttcagcagctacggcatgagctgggtgaggcagacccccgacaagaggctggagctggtggccagcatcaacaagaacggcggcagcacctactaccccgacagcgtgaagggcaggttcaccatcagcagggacaacgccaagaccaccgtgtacctgcagatgagcagcctgaagagcgaggacaccgccatgtactactgcaccaggggcggcttcgcctactggggccagggcaccctggtgaccgtgagcgccggcagcaccagcggcagcggcaagcccggcagcggcgagggcagcaccaagggccagatcgtgctgacccagagccccgccatcatgagcgccagccccggcgagaaggtgaccctgacctgcagcgccagcagcagcgtgggctacatgtactggtaccagcagaggcccggcagcagccccaggctgctgatctacgacaccagcaacctgcccagcggcgtgcccgtgaggttcagcggcagcggcagcggcaccagctacagcctgaccatcagcaggatggaggccgaggacgccgccacctactactgccagcagtggagcggctacccccccatcaccttcggcgccggcaccaagctggagctgaaggagcagaaactgatcagcgaggaagatctgaatcctggcggaggcggaggaagtggtggcggaggttctggtggcggtggatcaggcggtggcggatctggatctatggatatccagatgacccagtccccgagctccctgtccgcctctgtgggcgatagggtcaccatcacctgccgtgccagtcaggacatccgtaattatctgaactggtatcaacagaaaccaggaaaagctccgaaactactgatttactatacctcccgcctggagtctggagtcccttctcgcttctctggttctggttctgggacggattacactctgaccatcagcagtctgcaaccggaagacttcgcaacttattactgtcagcaaggtaatactctgccgtggacgttcggacagggcaccaaggtggagatcaaaggcggcggcggaagtggaggaggaggctcaggcggaggagggagcgaggttcagctggtggagtctggcggtggcctggtgcagccagggggctcactccgtttgtcctgtgcagcttctggctactcctttaccggctacactatgaactgggtgcgtcaggccccaggtaagggcctggaatgggttgcactgattaatcctaccaaaggtgttagtacctacaaccagaagttcaaggaccgtttcactataagcgtagataaatccaaaaacacagcctacctgcaaatgaacagcctgcgtgctgaggacactgccgtctattattgtgctagaagcggatactacggcgatagtgactggtattttgacgtgtggggtcaaggaaccctggtcaccgtctcctcgacatctggcggcggaggatctctggaatctggacaggtgctgctggaaagcaacatcaaggtgctgcccacctggtctaccccagttcagcctatggctctgattgtgcttggcggagttgccggcctgctgctctttatcggcctgggcatcttcttttgcgtgcggtgcagacatcggcggagacaggctgagagaatgagccagatcaagcggctgctgagcgagaagaaaacctgtcagtgccctcaccggttccagaaaacatgcagccccatc

SEQ ID NO: 629 - DNA, 1539 bp, Artificial Sequence
  Description of Artificial Sequence: Synthetic polynucleotide
atggctctgcctgtgacagctctgttgctgcctctggctctgctgctgcatgctgctagacctcagctgcagctgcaggagagcggcggcggcctggtgcaggccggcggcagcctgaggctgagctgcgccgccagcggcaggaccggcagcagctacgccatgggctggttcaggcaggcccccggcaaggagagggagttcgtggccgccatcacctggagcggcggcatcaccgcctacgccgacagcgtgaagggcaggttcaccatcagcagggacaacgccaagaacaccgtgtacctgcagatgaacagcctgaagcccgaggacaccgccgtgtactgctgcgccgccggcgtgaccggcagccccagcttcgacagctggggccagggcacccaggtgaccgtgagcagcgagcagaaactgatcagcgaggaagatctgaatcctggcggaggcggaggaagtggtggcggaggttctggtggcggtggatcaggcggtggcggatctggatctatggatatccagatgacccagtccccgagctccctgtccgcctctgtgggcgatagggtcaccatcacctgccgtgccagtcaggacatccgtaattatctgaactggtatcaacagaaaccaggaaaagctccgaaactactgatttactatacctcccgcctggagtctggagtcccttctcgcttctctggttctggttctgggacggattacactctgaccatcagcagtctgcaaccggaagacttcgcaacttattactgtcagcaaggtaatactctgccgtggacgttcggacagggcaccaaggtggagatcaaaggcggcggcggaagtggaggaggaggctcaggcggaggagggagcgaggttcagctggtggagtctggcggtggcctggtgcagccagggggctcactccgtttgtcctgtgcagcttctggctactcctttaccggctacactatgaactgggtgcgtcaggccccaggtaagggcctggaatgggttgcactgattaatcctaccaaaggtgttagtacctacaaccagaagttcaaggaccgtttcactataagcgtagataaatccaaaaacacagcctacctgcaaatgaacagcctgcgtgctgaggacactgccgtctattattgtgctagaagcggatactacggcgatagtgactggtattttgacgtgtggggtcaaggaaccctggtcaccgtctcctcgacatctggcggcggaggatctctggaatctggacaggtgctgctggaaagcaacatcaaggtgctgcccacctggtctaccccagttcagcctatggctctgattgtgcttggcggagttgccggcctgctgctctttatcggcctgggcatcttcttttgcgtgcggtgcagacatcggcggagacaggctgagagaatgagccagatcaagcggctgctgagcgagaagaaaacctgtcagtgccctcaccggttccagaaaacatgcagccccatc

SEQ ID NO: 630 - DNA, 1539 bp, Artificial Sequence
  Description of Artificial Sequence: Synthetic polynucleotide
atggctctgcctgtgacagctctgttgctgcctctggctctgctgctgcatgctgctagacctcaggtgcagctgcaggagagcggcggcggcctggtgcaggccggcggcagcctgaggctgagctgcgccgccagcggcaggaccttcagcagctacgccatgggctggttcaggcaggcccccggcaaggagagggagttcgtggccgccatcagcggcagcggcggcagcatctactacggcgacagcgtgaagggcaggttcaccatcagcagggacaacgccaagaacaccatgtacctgcagatgaacaggctgaagcccgaggacaccgccgtgtactactgcgccgccggccccctgggcagccccgacttcgacagctggggccagggcacccaggtgaccgtgagcagcgagcagaaactgatcagcgaggaagatctgaatcctggcggaggcggaggaagtggtggcggaggttctggtggcggtggatcaggcggtggcggatctggatctatggatatccagatgacccagtccccgagctccctgtccgcctctgtgggcgatagggtcaccatcacctgccgtgccagtcaggacatccgtaattatctgaactggtatcaacagaaaccaggaaaagctccgaaactactgatttactatacctcccgcctggagtctggagtcccttctcgcttctctggttctggttctgggacggattacactctgaccatcagcagtctgcaaccggaagacttcgcaacttattactgtcagcaaggtaatactctgccgtggacgttcggacagggcaccaaggtggagatcaaaggcggcggcggaagtggaggaggaggctcaggcggaggagggagcgaggttcagctggtggagtctggcggtggcctggtgcagccagggggctcactccgtttgtcctgtgcagcttctggctactcctttaccggctacactatgaactgggtgcgtcaggccccaggtaagggcctggaatgggttgcactgattaatcctaccaaaggtgttagtacctacaaccagaagttcaaggaccgtttcactataagcgtagataaatccaaaaacacagcctacctgcaaatgaacagcctgcgtgctgaggacactgccgtctattattgtgctagaagcggatactacggcgatagtgactggtattttgacgtgtggggtcaaggaaccctggtcaccgtctcctcgacatctggcggcggaggatctctggaatctggacaggtgctgctggaaagcaacatcaaggtgctgcccacctggtctaccccagttcagcctatggctctgattgtgcttggcggagttgccggcctgctgctctttatcggcctgggcatcttcttttgcgtgcggtgcagacatcggcggagacaggctgagagaatgagccagatcaagcggctgctgagcgagaagaaaacctgtcagtgccctcaccggttccagaaaacatgcagccccatc

SEQ ID NO: 631 - DNA, 1539 bp, Artificial Sequence
  Description of Artificial Sequence: Synthetic polynucleotide
atggctctgcctgtgacagctctgttgctgcctctggctctgctgctgcatgctgctagacctgaggtgcaggtggtggagagcggcggcggcctggtgcagcccggcggcagcctgaggctgagctgcgtggccagcggcaggaccttcagcagctacgccatgggctggttcaggcaggcccccggcaaggagagggagttcgtggccgccatcagcggcagcggcggcagcatctactacggcgacagcgtgaagggcaggttcaccatcagcagggacaacgccaagaacaccatgtacctgcagatgaacaggctgaagcccgaggacaccgccgtgtactactgcgccgccggccccctgggcagccccgacttcgacagctggggccagggcacccaggtgaccgtgagcagcgagcagaaactgatcagcgaggaagatctgaatcctggcggaggcggaggaagtggtggcggaggttctggtggcggtggatcaggcggtggcggatctggatctatggatatccagatgacccagtccccgagctccctgtccgcctctgtgggcgatagggtcaccatcacctgccgtgccagtcaggacatccgtaattatctgaactggtatcaacagaaaccaggaaaagctccgaaactactgatttactatacctcccgcctggagtctggagtcccttctcgcttctctggttctggttctgggacggattacactctgaccatcagcagtctgcaaccggaagacttcgcaacttattactgtcagcaaggtaatactctgccgtggacgttcggacagggcaccaaggtggagatcaaaggcggcggcggaagtggaggaggaggctcaggcggaggagggagcgaggttcagctggtggagtctggcggtggcctggtgcagccagggggctcactccgtttgtcctgtgcagcttctggctactcctttaccggctacactatgaactgggtgcgtcaggccccaggtaagggcctggaatgggttgcactgattaatcctaccaaaggtgttagtacctacaaccagaagttcaaggaccgtttcactataagcgtagataaatccaaaaacacagcctacctgcaaatgaacagcctgcgtgctgaggacactgccgtctattattgtgctagaagcggatactacggcgatagtgactggtattttgacgtgtggggtcaaggaaccctggtcaccgtctcctcgacatctggcggcggaggatctctggaatctggacaggtgctgctggaaagcaacatcaaggtgctgcccacctggtctaccccagttcagcctatggctctgattgtgcttggcggagttgccggcctgctgctctttatcggcctgggcatcttcttttgcgtgcggtgcagacatcggcggagacaggctgagagaatgagccagatcaagcggctgctgagcgagaagaaaacctgtcagtgccctcaccggttccagaaaacatgcagccccatc

SEQ ID NO: 632 - DNA, 1539 bp, Artificial Sequence
  Description of Artificial Sequence: Synthetic polynucleotide
atggctctgcctgtgacagctctgttgctgcctctggctctgctgctgcatgctgctagacctaaggtgcagctggtggagagcggcggcggcctggtgcaggccggcggcagcctgaggctgagctgcgccgccagcggcaggaccggcagcagctacgccatgggctggttcaggcaggcccccggcaaggagagggagttcgtggccgccatcacctggagcggcggcatcaccgcctacgccgacagcgtgaagggcaggttcaccatcagcagggacaacgccaagaacaccgtgtacctgcagatgaacagcctgaagcccgaggacaccgccgtgtactgctgcgccgccggcgtgaccggcagccccagcttcgacagctggggccagggcacccaggtgaccgtgagcagcgagcagaaactgatcagcgaggaagatctgaatcctggcggaggcggaggaagtggtggcggaggttctggtggcggtggatcaggcggtggcggatctggatctatggatatccagatgacccagtccccgagctccctgtccgcctctgtgggcgatagggtcaccatcacctgccgtgccagtcaggacatccgtaattatctgaactggtatcaacagaaaccaggaaaagctccgaaactactgatttactatacctcccgcctggagtctggagtcccttctcgcttctctggttctggttctgggacggattacactctgaccatcagcagtctgcaaccggaagacttcgcaacttattactgtcagcaaggtaatactctgccgtggacgttcggacagggcaccaaggtggagatcaaaggcggcggcggaagtggaggaggaggctcaggcggaggagggagcgaggttcagctggtggagtctggcggtggcctggtgcagccagggggctcactccgtttgtcctgtgcagcttctggctactcctttaccggctacactatgaactgggtgcgtcaggccccaggtaagggcctggaatgggttgcactgattaatcctaccaaaggtgttagtacctacaaccagaagttcaaggaccgtttcactataagcgtagataaatccaaaaacacagcctacctgcaaatgaacagcctgcgtgctgaggacactgccgtctattattgtgctagaagcggatactacggcgatagtgactggtattttgacgtgtggggtcaaggaaccctggtcaccgtctcctcgacatctggcggcggaggatctctggaatctggacaggtgctgctggaaagcaacatcaaggtgctgcccacctggtctaccccagttcagcctatggctctgattgtgcttggcggagttgccggcctgctgctctttatcggcctgggcatcttcttttgcgtgcggtgcagacatcggcggagacaggctgagagaatgagccagatcaagcggctgctgagcgagaagaaaacctgtcagtgccctcaccggttccagaaaacatgcagccccatc

SEQ ID NO: 633 - DNA, 1539 bp, Artificial Sequence
  Description of Artificial Sequence: Synthetic polynucleotide
atggctctgcctgtgacagctctgttgctgcctctggctctgctgctgcatgctgctagacctgaggtgcagctggtggagagcggcggcggcctggtgcaggccggcggcagcctgaggctgagctgcgccgccagcggcaggaccttcagcagctacgccatgggctggttcaggcaggcccccggcaaggagagggagttcgtggccgccatcagcggcagcggcggcgtgaccttctacgcccacagcgtgaagggcaggttcaccatcagcagggacaacgccaagaacaccgtgtacctgcagatgaacagcctgaagcccgaggacaccgccgtgtacagctgcgccggcggcgcccacggcagccccgacttcggcagctggggccagggcacccaggtgaccgtgagcagcgagcagaaactgatcagcgaggaagatctgaatcctggcggaggcggaggaagtggtggcggaggttctggtggcggtggatcaggcggtggcggatctggatctatggatatccagatgacccagtccccgagctccctgtccgcctctgtgggcgatagggtcaccatcacctgccgtgccagtcaggacatccgtaattatctgaactggtatcaacagaaaccaggaaaagctccgaaactactgatttactatacctcccgcctggagtctggagtcccttctcgcttctctggttctggttctgggacggattacactctgaccatcagcagtctgcaaccggaagacttcgcaacttattactgtcagcaaggtaatactctgccgtggacgttcggacagggcaccaaggtggagatcaaaggcggcggcggaagtggaggaggaggctcaggcggaggagggagcgaggttcagctggtggagtctggcggtggcctggtgcagccagggggctcactccgtttgtcctgtgcagcttctggctactcctttaccggctacactatgaactgggtgcgtcaggccccaggtaagggcctggaatgggttgcactgattaatcctaccaaaggtgttagtacctacaaccagaagttcaaggaccgtttcactataagcgtagataaatccaaaaacacagcctacctgcaaatgaacagcctgcgtgctgaggacactgccgtctattattgtgctagaagcggatactacggcgatagtgactggtattttgacgtgtggggtcaaggaaccctggtcaccgtctcctcgacatctggcggcggaggatctctggaatctggacaggtgctgctggaaagcaacatcaaggtgctgcccacctggtctaccccagttcagcctatggctctgattgtgcttggcggagttgccggcctgctgctctttatcggcctgggcatcttcttttgcgtgcggtgcagacatcggcggagacaggctgagagaatgagccagatcaagcggctgctgagcgagaagaaaacctgtcagtgccctcaccggttccagaaaacatgcagccccatc

SEQ ID NO: 634 - DNA, 1527 bp, Artificial Sequence
  Description of Artificial Sequence: Synthetic polynucleotide
atggctctgcctgtgacagctctgttgctgcctctggctctgctgctgcatgctgctagacctcaggtgcagctggtggagagcggcggcggcctggtgcagcccggcggcagcctgaggctgagctgcgccgtgagcaggaacatcgccagcctgtacagggtggactggtacaggcaggcccccggcaagcagagggagctggtggccggcaggaccagcggcggcaccaccacctacctggacgccgtggagggcaggttcaccatcagcagggacaacgtgaaggacaccgtgtacctgcagatgaacagcctgacccccgaggacaccgccgtgtactactgccacgcccacgaccactggagggacagctggggccagggcacccaggtgaccgtgagcagcgagcagaaactgatcagcgaggaagatctgaatcctggcggaggcggaggaagtggtggcggaggttctggtggcggtggatcaggcggtggcggatctggatctatggatatccagatgacccagtccccgagctccctgtccgcctctgtgggcgatagggtcaccatcacctgccgtgccagtcaggacatccgtaattatctgaactggtatcaacagaaaccaggaaaagctccgaaactactgatttactatacctcccgcctggagtctggagtcccttctcgcttctctggttctggttctgggacggattacactctgaccatcagcagtctgcaaccggaagacttcgcaacttattactgtcagcaaggtaatactctgccgtggacgttcggacagggcaccaaggtggagatcaaaggcggcggcggaagtggaggaggaggctcaggcggaggagggagcgaggttcagctggtggagtctggcggtggcctggtgcagccagggggctcactccgtttgtcctgtgcagcttctggctactcctttaccggctacactatgaactgggtgcgtcaggccccaggtaagggcctggaatgggttgcactgattaatcctaccaaaggtgttagtacctacaaccagaagttcaaggaccgtttcactataagcgtagataaatccaaaaacacagcctacctgcaaatgaacagcctgcgtgctgaggacactgccgtctattattgtgctagaagcggatactacggcgatagtgactggtattttgacgtgtggggtcaaggaaccctggtcaccgtctcctcgacatctggcggcggaggatctctggaatctggacaggtgctgctggaaagcaacatcaaggtgctgcccacctggtctaccccagttcagcctatggctctgattgtgcttggcggagttgccggcctgctgctctttatcggcctgggcatcttcttttgcgtgcggtgcagacatcggcggagacaggctgagagaatgagccagatcaagcggctgctgagcgagaagaaaacctgtcagtgccctcaccggttccagaaaacatgcagccccatc

SEQ ID NO: 635 - DNA, 1527 bp, Artificial Sequence
  Description of Artificial Sequence: Synthetic polynucleotide
atggctctgcctgtgacagctctgttgctgcctctggctctgctgctgcatgctgctagacctcaggtgcagctggtggagagcggcggcgacctggtgcagcccggcggcagcctgaggctgagctgcgccgccagcggcagcatcggcagcatctacgccatgggctggtacaggcaggcccccggcaggcagagggagctggtggccaccaccaccagcggcggcaccaccaactacgccgacagcgtgaagggcaggttcaccatcgccggcgacaacgccaagaacaccgtgttcctgcagatgaacagcctgaggcccgaggacaccgccgtgtactactgcaagatccagacccactggtacgtgtactggggccagggcacccaggtgaccgtgagcagcgagcagaaactgatcagcgaggaagatctgaatcctggcggaggcggaggaagtggtggcggaggttctggtggcggtggatcaggcggtggcggatctggatctatggatatccagatgacccagtccccgagctccctgtccgcctctgtgggcgatagggtcaccatcacctgccgtgccagtcaggacatccgtaattatctgaactggtatcaacagaaaccaggaaaagctccgaaactactgatttactatacctcccgcctggagtctggagtcccttctcgcttctctggttctggttctgggacggattacactctgaccatcagcagtctgcaaccggaagacttcgcaacttattactgtcagcaaggtaatactctgccgtggacgttcggacagggcaccaaggtggagatcaaaggcggcggcggaagtggaggaggaggctcaggcggaggagggagcgaggttcagctggtggagtctggcggtggcctggtgcagccagggggctcactccgtttgtcctgtgcagcttctggctactcctttaccggctacactatgaactgggtgcgtcaggccccaggtaagggcctggaatgggttgcactgattaatcctaccaaaggtgttagtacctacaaccagaagttcaaggaccgtttcactataagcgtagataaatccaaaaacacagcctacctgcaaatgaacagcctgcgtgctgaggacactgccgtctattattgtgctagaagcggatactacggcgatagtgactggtattttgacgtgtggggtcaaggaaccctggtcaccgtctcctcgacatctggcggcggaggatctctggaatctggacaggtgctgctggaaagcaacatcaaggtgctgcccacctggtctaccccagttcagcctatggctctgattgtgcttggcggagttgccggcctgctgctctttatcggcctgggcatcttcttttgcgtgcggtgcagacatcggcggagacaggctgagagaatgagccagatcaagcggctgctgagcgagaagaaaacctgtcagtgccctcaccggttccagaaaacatgcagccccatc

SEQ ID NO: 636 - DNA, 1527 bp, Artificial Sequence
  Description of Artificial Sequence: Synthetic polynucleotide
atggctctgcctgtgacagctctgttgctgcctctggctctgctgctgcatgctgctagacctgaggtgcagctggtggagagcggcggcggcctggtgcagcccggcggcagcctgaggctgagctgcgccgccagcaggaacatcttcagcctgtacagggtggactggtacaggcaggcccccggcaagcagagggagctggtggccggcagcaccagcggcggcaccaccacctacgccgacgccgtgaagggcaggttcaccatcagcaccgacaacgtgaaggacaccgtgtacctgcagatgaacagcctgacccccgaggacaccgccgtgtactactgccacgcccacgaccactggagggacagctggggccagggcacccaggtgaccgtgagcagcgagcagaaactgatcagcgaggaagatctgaatcctggcggaggcggaggaagtggtggcggaggttctggtggcggtggatcaggcggtggcggatctggatctatggatatccagatgacccagtccccgagctccctgtccgcctctgtgggcgatagggtcaccatcacctgccgtgccagtcaggacatccgtaattatctgaactggtatcaacagaaaccaggaaaagctccgaaactactgatttactatacctcccgcctggagtctggagtcccttctcgcttctctggttctggttctgggacggattacactctgaccatcagcagtctgcaaccggaagacttcgcaacttattactgtcagcaaggtaatactctgccgtggacgttcggacagggcaccaaggtggagatcaaaggcggcggcggaagtggaggaggaggctcaggcggaggagggagcgaggttcagctggtggagtctggcggtggcctggtgcagccagggggctcactccgtttgtcctgtgcagcttctggctactcctttaccggctacactatgaactgggtgcgtcaggccccaggtaagggcctggaatgggttgcactgattaatcctaccaaaggtgttagtacctacaaccagaagttcaaggaccgtttcactataagcgtagataaatccaaaaacacagcctacctgcaaatgaacagcctgcgtgctgaggacactgccgtctattattgtgctagaagcggatactacggcgatagtgactggtattttgacgtgtggggtcaaggaaccctggtcaccgtctcctcgacatctggcggcggaggatctctggaatctggacaggtgctgctggaaagcaacatcaaggtgctgcccacctggtctaccccagttcagcctatggctctgattgtgcttggcggagttgccggcctgctgctctttatcggcctgggcatcttcttttgcgtgcggtgcagacatcggcggagacaggctgagagaatgagccagatcaagcggctgctgagcgagaagaaaacctgtcagtgccctcaccggttccagaaaacatgcagccccatc

SEQ ID NO: 637 - DNA, 1527 bp, Artificial Sequence
  Description of Artificial Sequence: Synthetic polynucleotide
atggctctgcctgtgacagctctgttgctgcctctggctctgctgctgcatgctgctagacctcaggtgcagctggtggagagcggcggcggctgggtgcaccccggcggcagcctgaggctgagctgcgccgccagcaggaacatcttcagcatgtacagggtggactggtacaggcaggcccccggcaagcagagggagctggtggccggcatcaccagcggcggcaccaccagctacgccgacgccgtgaagggcaggttcaccatcagcaccgacaacgtgaaggacaccgtgtacctgcagatgaacagcgtgacccccgaggacaccgccgtgtactactgccacgcccacgaccactggagggacagctggggccagggcacccaggtgaccgtgagcagcgagcagaaactgatcagcgaggaagatctgaatcctggcggaggcggaggaagtggtggcggaggttctggtggcggtggatcaggcggtggcggatctggatctatggatatccagatgacccagtccccgagctccctgtccgcctctgtgggcgatagggtcaccatcacctgccgtgccagtcaggacatccgtaattatctgaactggtatcaacagaaaccaggaaaagctccgaaactactgatttactatacctcccgcctggagtctggagtcccttctcgcttctctggttctggttctgggacggattacactctgaccatcagcagtctgcaaccggaagacttcgcaacttattactgtcagcaaggtaatactctgccgtggacgttcggacagggcaccaaggtggagatcaaaggcggcggcggaagtggaggaggaggctcaggcggaggagggagcgaggttcagctggtggagtctggcggtggcctggtgcagccagggggctcactccgtttgtcctgtgcagcttctggctactcctttaccggctacactatgaactgggtgcgtcaggccccaggtaagggcctggaatgggttgcactgattaatcctaccaaaggtgttagtacctacaaccagaagttcaaggaccgtttcactataagcgtagataaatccaaaaacacagcctacctgcaaatgaacagcctgcgtgctgaggacactgccgtctattattgtgctagaagcggatactacggcgatagtgactggtattttgacgtgtggggtcaaggaaccctggtcaccgtctcctcgacatctggcggcggaggatctctggaatctggacaggtgctgctggaaagcaacatcaaggtgctgcccacctggtctaccccagttcagcctatggctctgattgtgcttggcggagttgccggcctgctgctctttatcggcctgggcatcttcttttgcgtgcggtgcagacatcggcggagacaggctgagagaatgagccagatcaagcggctgctgagcgagaagaaaacctgtcagtgccctcaccggttccagaaaacatgcagccccatc

SEQ ID NO: 638 - DNA, 1527 bp, Artificial Sequence
  Description of Artificial Sequence: Synthetic polynucleotide
atggctctgcctgtgacagctctgttgctgcctctggctctgctgctgcatgctgctagacctgaggtgcaggtgcaggagagcggcggcgacctggtgcagcccggcggcagcctgaggctgagctgcgccgccagcggcagcatcggcagcatctacaggaagggctggtacaggcaggcccccggcagccagagggagctggtggccaccatcaccagcgccggcaccaccaactacgccgacagcgtgaagggcaggttcaccatcagcagggacaacgccaagaacaccgtgtacctgcagatgaacagcctgaggcccgaggacaccgccgtgtactactgcaacttccagacccactggtacgtgtactggggccagggcacccaggtgaccgtgagcagcgagcagaaactgatcagcgaggaagatctgaatcctggcggaggcggaggaagtggtggcggaggttctggtggcggtggatcaggcggtggcggatctggatctatggatatccagatgacccagtccccgagctccctgtccgcctctgtgggcgatagggtcaccatcacctgccgtgccagtcaggacatccgtaattatctgaactggtatcaacagaaaccaggaaaagctccgaaactactgatttactatacctcccgcctggagtctggagtcccttctcgcttctctggttctggttctgggacggattacactctgaccatcagcagtctgcaaccggaagacttcgcaacttattactgtcagcaaggtaatactctgccgtggacgttcggacagggcaccaaggtggagatcaaaggcggcggcggaagtggaggaggaggctcaggcggaggagggagcgaggttcagctggtggagtctggcggtggcctggtgcagccagggggctcactccgtttgtcctgtgcagcttctggctactcctttaccggctacactatgaactgggtgcgtcaggccccaggtaagggcctggaatgggttgcactgattaatcctaccaaaggtgttagtacctacaaccagaagttcaaggaccgtttcactataagcgtagataaatccaaaaacacagcctacctgcaaatgaacagcctgcgtgctgaggacactgccgtctattattgtgctagaagcggatactacggcgatagtgactggtattttgacgtgtggggtcaaggaaccctggtcaccgtctcctcgacatctggcggcggaggatctctggaatctggacaggtgctgctggaaagcaacatcaaggtgctgcccacctggtctaccccagttcagcctatggctctgattgtgcttggcggagttgccggcctgctgctctttatcggcctgggcatcttcttttgcgtgcggtgcagacatcggcggagacaggctgagagaatgagccagatcaagcggctgctgagcgagaagaaaacctgtcagtgccctcaccggttccagaaaacatgcagccccatc

SEQ ID NO: 639 - DNA, 1527 bp, Artificial Sequence
  Description of Artificial Sequence: Synthetic polynucleotide
atggctctgcctgtgacagctctgttgctgcctctggctctgctgctgcatgctgctagacctgaggtgaggctggtggagagcggcggcggcctggtgcagcccggcggcagcctgaggctgagctgcgccgtgagcaagaacatcttcagcatctacagggtggactggtaccaccaggcccccggcaagcagagggagctggtggccggctggaccagcggcggcagcaccagctacgccgacgccgtgaagggcaggttcaccatcagcaccgacaacgtgaaggacaccgtgtacctgcagatgaacagcctgacccccgaggacaccgccgtgtactactgccacgcccacgaccactggagggactactggggccagggcacccaggtgaccgtgagcagcgagcagaaactgatcagcgaggaagatctgaatcctggcggaggcggaggaagtggtggcggaggttctggtggcggtggatcaggcggtggcggatctggatctatggatatccagatgacccagtccccgagctccctgtccgcctctgtgggcgatagggtcaccatcacctgccgtgccagtcaggacatccgtaattatctgaactggtatcaacagaaaccaggaaaagctccgaaactactgatttactatacctcccgcctggagtctggagtcccttctcgcttctctggttctggttctgggacggattacactctgaccatcagcagtctgcaaccggaagacttcgcaacttattactgtcagcaaggtaatactctgccgtggacgttcggacagggcaccaaggtggagatcaaaggcggcggcggaagtggaggaggaggctcaggcggaggagggagcgaggttcagctggtggagtctggcggtggcctggtgcagccagggggctcactccgtttgtcctgtgcagcttctggctactcctttaccggctacactatgaactgggtgcgtcaggccccaggtaagggcctggaatgggttgcactgattaatcctaccaaaggtgttagtacctacaaccagaagttcaaggaccgtttcactataagcgtagataaatccaaaaacacagcctacctgcaaatgaacagcctgcgtgctgaggacactgccgtctattattgtgctagaagcggatactacggcgatagtgactggtattttgacgtgtggggtcaaggaaccctggtcaccgtctcctcgacatctggcggcggaggatctctggaatctggacaggtgctgctggaaagcaacatcaaggtgctgcccacctggtctaccccagttcagcctatggctctgattgtgcttggcggagttgccggcctgctgctctttatcggcctgggcatcttcttttgcgtgcggtgcagacatcggcggagacaggctgagagaatgagccagatcaagcggctgctgagcgagaagaaaacctgtcagtgccctcaccggttccagaaaacatgcagccccatc

SEQ ID NO: 640 - DNA, 1527 bp, Artificial Sequence
  Description of Artificial Sequence: Synthetic polynucleotide
atggctctgcctgtgacagctctgttgctgcctctggctctgctgctgcatgctgctagacctcaggtgcagctgcaggagagcggcggcggcctggtgcagcccggcggcagcctgaggctgagctgcgccgccagcaggagcatcttcggcatcgccttcatggactggtacaggcaggcccccggcaagcagagggagttcgtggccggcatcagccacagcggcgccaccagctacgccgacagcgtgaagggcaggttcaccgtgagcagggacaacgccaagaacaccatgtacctgcagatgaacaacctgctgcccgaggacagcgccgtgtactactgcaaggccgacaccgccaccaacaccgactggggccagggcacccaggtgaccgtgagcagcgagcagaaactgatcagcgaggaagatctgaatcctggcggaggcggaggaagtggtggcggaggttctggtggcggtggatcaggcggtggcggatctggatctatggatatccagatgacccagtccccgagctccctgtccgcctctgtgggcgatagggtcaccatcacctgccgtgccagtcaggacatccgtaattatctgaactggtatcaacagaaaccaggaaaagctccgaaactactgatttactatacctcccgcctggagtctggagtcccttctcgcttctctggttctggttctgggacggattacactctgaccatcagcagtctgcaaccggaagacttcgcaacttattactgtcagcaaggtaatactctgccgtggacgttcggacagggcaccaaggtggagatcaaaggcggcggcggaagtggaggaggaggctcaggcggaggagggagcgaggttcagctggtggagtctggcggtggcctggtgcagccagggggctcactccgtttgtcctgtgcagcttctggctactcctttaccggctacactatgaactgggtgcgtcaggccccaggtaagggcctggaatgggttgcactgattaatcctaccaaaggtgttagtacctacaaccagaagttcaaggaccgtttcactataagcgtagataaatccaaaaacacagcctacctgcaaatgaacagcctgcgtgctgaggacactgccgtctattattgtgctagaagcggatactacggcgatagtgactggtattttgacgtgtggggtcaaggaaccctggtcaccgtctcctcgacatctggcggcggaggatctctggaatctggacaggtgctgctggaaagcaacatcaaggtgctgcccacctggtctaccccagttcagcctatggctctgattgtgcttggcggagttgccggcctgctgctctttatcggcctgggcatcttcttttgcgtgcggtgcagacatcggcggagacaggctgagagaatgagccagatcaagcggctgctgagcgagaagaaaacctgtcagtgccctcaccggttccagaaaacatgcagccccatc

SEQ ID NO: 641 - DNA, 1542 bp, Artificial Sequence
  Description of Artificial Sequence: Synthetic polynucleotide
atggctctgcctgtgacagctctgttgctgcctctggctctgctgctgcatgctgctagacctcaggtgcagctgcaggagagcggcggcggcctggtgcagcccggcggcagcctgaggctgagctgcgccgccagcggcatcatcttcagcatcaacaccatggcctggtacaggcagggccccggcaagcagagggacctggtggccctgatcagcagcggcggcaacaccagctacgccgacagcgtgaacggcaggttcaccatcagcagggacaacgccaagaacaccgtgtacctgcagatgaacggcctgaagcccgaggacaccgccgtgtactactgcaacagcgccggcaggagctacagcggcagctacggcgcctactggggccagggcacccaggtgaccgtgagcagcgagcagaaactgatcagcgaggaagatctgaatcctggcggaggcggaggaagtggtggcggaggttctggtggcggtggatcaggcggtggcggatctggatctatggatatccagatgacccagtccccgagctccctgtccgcctctgtgggcgatagggtcaccatcacctgccgtgccagtcaggacatccgtaattatctgaactggtatcaacagaaaccaggaaaagctccgaaactactgatttactatacctcccgcctggagtctggagtcccttctcgcttctctggttctggttctgggacggattacactctgaccatcagcagtctgcaaccggaagacttcgcaacttattactgtcagcaaggtaatactctgccgtggacgttcggacagggcaccaaggtggagatcaaaggcggcggcggaagtggaggaggaggctcaggcggaggagggagcgaggttcagctggtggagtctggcggtggcctggtgcagccagggggctcactccgtttgtcctgtgcagcttctggctactcctttaccggctacactatgaactgggtgcgtcaggccccaggtaagggcctggaatgggttgcactgattaatcctaccaaaggtgttagtacctacaaccagaagttcaaggaccgtttcactataagcgtagataaatccaaaaacacagcctacctgcaaatgaacagcctgcgtgctgaggacactgccgtctattattgtgctagaagcggatactacggcgatagtgactggtattttgacgtgtggggtcaaggaaccctggtcaccgtctcctcgacatctggcggcggaggatctctggaatctggacaggtgctgctggaaagcaacatcaaggtgctgcccacctggtctaccccagttcagcctatggctctgattgtgcttggcggagttgccggcctgctgctctttatcggcctgggcatcttcttttgcgtgcggtgcagacatcggcggagacaggctgagagaatgagccagatcaagcggctgctgagcgagaagaaaacctgtcagtgccctcaccggttccagaaaacatgcagccccatc

SEQ ID NO: 642 - DNA, 1527 bp, Artificial Sequence
  Description of Artificial Sequence: Synthetic polynucleotide
atggctctgcctgtgacagctctgttgctgcctctggctctgctgctgcatgctgctagacctgaggtgcagctggtggagagcggcggcggcctggtgcagcccggcggcagcctgaggctgagctgcgccgccagcaggagcatcttcgtgatcgccttcatggactggtacaggcaggcccccggcaagcagagggagttcgtggccggcatcagcagcagcggcgccaccagctacgccagcagcgtgaagggcaggttcaccgtgagcagggacaccgccaagaacaccatgtacctgcagatgaacaacctgctgcccgaggacagcgccgtgtactactgcaaggccgacaccgccaccaccaccgactggggccagggcacccaggtgaccgtgagcagcgagcagaaactgatcagcgaggaagatctgaatcctggcggaggcggaggaagtggtggcggaggttctggtggcggtggatcaggcggtggcggatctggatctatggatatccagatgacccagtccccgagctccctgtccgcctctgtgggcgatagggtcaccatcacctgccgtgccagtcaggacatccgtaattatctgaactggtatcaacagaaaccaggaaaagctccgaaactactgatttactatacctcccgcctggagtctggagtcccttctcgcttctctggttctggttctgggacggattacactctgaccatcagcagtctgcaaccggaagacttcgcaacttattactgtcagcaaggtaatactctgccgtggacgttcggacagggcaccaaggtggagatcaaaggcggcggcggaagtggaggaggaggctcaggcggaggagggagcgaggttcagctggtggagtctggcggtggcctggtgcagccagggggctcactccgtttgtcctgtgcagcttctggctactcctttaccggctacactatgaactgggtgcgtcaggccccaggtaagggcctggaatgggttgcactgattaatcctaccaaaggtgttagtacctacaaccagaagttcaaggaccgtttcactataagcgtagataaatccaaaaacacagcctacctgcaaatgaacagcctgcgtgctgaggacactgccgtctattattgtgctagaagcggatactacggcgatagtgactggtattttgacgtgtggggtcaaggaaccctggtcaccgtctcctcgacatctggcggcggaggatctctggaatctggacaggtgctgctggaaagcaacatcaaggtgctgcccacctggtctaccccagttcagcctatggctctgattgtgcttggcggagttgccggcctgctgctctttatcggcctgggcatcttcttttgcgtgcggtgcagacatcggcggagacaggctgagagaatgagccagatcaagcggctgctgagcgagaagaaaacctgtcagtgccctcaccggttccagaaaacatgcagccccatc

SEQ ID NO: 643 - DNA, 1542 bp, Artificial Sequence
  Description of Artificial Sequence: Synthetic polynucleotide
atggctctgcctgtgacagctctgttgctgcctctggctctgctgctgcatgctgctagacctgaggtgcagctggtggagagcggcggcggcctggtgcagcccggcggcagcctgaggctgagctgcgccgccagcggcatcatcttcagcatcaacaccatggcctggtacaggcagggccccggcaaggagagggacctggtggccgtgatcaagggcgacggcagcaccagctacgccgacagcgtgaacggcaggttcaccatcagcagggacaacgccaagaacaccgtgtacctgaggatgaacggcctgaagcccgaggacaccgccgtgtactactgcaacagcgccggcaggagctacagcggcgtgtacggcgcctactggggccagggcacccaggtgaccgtgagcagcgagcagaaactgatcagcgaggaagatctgaatcctggcggaggcggaggaagtggtggcggaggttctggtggcggtggatcaggcggtggcggatctggatctatggatatccagatgacccagtccccgagctccctgtccgcctctgtgggcgatagggtcaccatcacctgccgtgccagtcaggacatccgtaattatctgaactggtatcaacagaaaccaggaaaagctccgaaactactgatttactatacctcccgcctggagtctggagtcccttctcgcttctctggttctggttctgggacggattacactctgaccatcagcagtctgcaaccggaagacttcgcaacttattactgtcagcaaggtaatactctgccgtggacgttcggacagggcaccaaggtggagatcaaaggcggcggcggaagtggaggaggaggctcaggcggaggagggagcgaggttcagctggtggagtctggcggtggcctggtgcagccagggggctcactccgtttgtcctgtgcagcttctggctactcctttaccggctacactatgaactgggtgcgtcaggccccaggtaagggcctggaatgggttgcactgattaatcctaccaaaggtgttagtacctacaaccagaagttcaaggaccgtttcactataagcgtagataaatccaaaaacacagcctacctgcaaatgaacagcctgcgtgctgaggacactgccgtctattattgtgctagaagcggatactacggcgatagtgactggtattttgacgtgtggggtcaaggaaccctggtcaccgtctcctcgacatctggcggcggaggatctctggaatctggacaggtgctgctggaaagcaacatcaaggtgctgcccacctggtctaccccagttcagcctatggctctgattgtgcttggcggagttgccggcctgctgctctttatcggcctgggcatcttcttttgcgtgcggtgcagacatcggcggagacaggctgagagaatgagccagatcaagcggctgctgagcgagaagaaaacctgtcagtgccctcaccggttccagaaaacatgcagccccatc

SEQ ID NO: 644 - DNA, 1542 bp, Artificial Sequence
  Description of Artificial Sequence: Synthetic polynucleotide
atggctctgcctgtgacagctctgttgctgcctctggctctgctgctgcatgctgctagacctgaggtgcagctgcaggagagcggcggcggcctggtgcagcccggcggcagcctgaagctgagctgcgccgccagcggcagcatcttcagcatcggcgccatgaggtggtacaggcaggtgcccggcaacgagagggagctggtggccggcatcaccaacggcggcaacaccaactacgccgacagcgtgaaggccaggttcaccatcagcagggacaacgccaagaacaccgtgtacctgcagatgaacagcctgaagcccgaggacaccaccgtgtacttctgcaacgccgacgtgcagaacagcggctacgtgtggggcaactactggggccagggcacccaggtgaccgtgagcagcgagcagaaactgatcagcgaggaagatctgaatcctggcggaggcggaggaagtggtggcggaggttctggtggcggtggatcaggcggtggcggatctggatctatggatatccagatgacccagtccccgagctccctgtccgcctctgtgggcgatagggtcaccatcacctgccgtgccagtcaggacatccgtaattatctgaactggtatcaacagaaaccaggaaaagctccgaaactactgatttactatacctcccgcctggagtctggagtcccttctcgcttctctggttctggttctgggacggattacactctgaccatcagcagtctgcaaccggaagacttcgcaacttattactgtcagcaaggtaatactctgccgtggacgttcggacagggcaccaaggtggagatcaaaggcggcggcggaagtggaggaggaggctcaggcggaggagggagcgaggttcagctggtggagtctggcggtggcctggtgcagccagggggctcactccgtttgtcctgtgcagcttctggctactcctttaccggctacactatgaactgggtgcgtcaggccccaggtaagggcctggaatgggttgcactgattaatcctaccaaaggtgttagtacctacaaccagaagttcaaggaccgtttcactataagcgtagataaatccaaaaacacagcctacctgcaaatgaacagcctgcgtgctgaggacactgccgtctattattgtgctagaagcggatactacggcgatagtgactggtattttgacgtgtggggtcaaggaaccctggtcaccgtctcctcgacatctggcggcggaggatctctggaatctggacaggtgctgctggaaagcaacatcaaggtgctgcccacctggtctaccccagttcagcctatggctctgattgtgcttggcggagttgccggcctgctgctctttatcggcctgggcatcttcttttgcgtgcggtgcagacatcggcggagacaggctgagagaatgagccagatcaagcggctgctgagcgagaagaaaacctgtcagtgccctcaccggttccagaaaacatgcagccccatc

SEQ ID NO: 645 - DNA, 1527 bp, Artificial Sequence
  Description of Artificial Sequence: Synthetic polynucleotide
atggctctgcctgtgacagctctgttgctgcctctggctctgctgctgcatgctgctagacctgaggtgcagctggtggagagcggcggcggcctggtgcagcccggcggcagcctgaggctgagctgcgccgccagcaggagcatcttcgtgatcgccttcatggactggtacaggcaggcccccggcaagcagagggagttcgtggccggcatcagcagcagcggcgccaccagctacgccgacagcgtgaagggcaggttcaccgtgagcagggacaccgccaagaacaccatgtacctgcagatgaacaacctgctgcccgaggacagcgccgtgtactactgcaaggccgacaccgccaccaacaccgactggggccagggcacccaggtgaccgtgagcagcgagcagaaactgatcagcgaggaagatctgaatcctggcggaggcggaggaagtggtggcggaggttctggtggcggtggatcaggcggtggcggatctggatctatggatatccagatgacccagtccccgagctccctgtccgcctctgtgggcgatagggtcaccatcacctgccgtgccagtcaggacatccgtaattatctgaactggtatcaacagaaaccaggaaaagctccgaaactactgatttactatacctcccgcctggagtctggagtcccttctcgcttctctggttctggttctgggacggattacactctgaccatcagcagtctgcaaccggaagacttcgcaacttattactgtcagcaaggtaatactctgccgtggacgttcggacagggcaccaaggtggagatcaaaggcggcggcggaagtggaggaggaggctcaggcggaggagggagcgaggttcagctggtggagtctggcggtggcctggtgcagccagggggctcactccgtttgtcctgtgcagcttctggctactcctttaccggctacactatgaactgggtgcgtcaggccccaggtaagggcctggaatgggttgcactgattaatcctaccaaaggtgttagtacctacaaccagaagttcaaggaccgtttcactataagcgtagataaatccaaaaacacagcctacctgcaaatgaacagcctgcgtgctgaggacactgccgtctattattgtgctagaagcggatactacggcgatagtgactggtattttgacgtgtggggtcaaggaaccctggtcaccgtctcctcgacatctggcggcggaggatctctggaatctggacaggtgctgctggaaagcaacatcaaggtgctgcccacctggtctaccccagttcagcctatggctctgattgtgcttggcggagttgccggcctgctgctctttatcggcctgggcatcttcttttgcgtgcggtgcagacatcggcggagacaggctgagagaatgagccagatcaagcggctgctgagcgagaagaaaacctgtcagtgccctcaccggttccagaaaacatgcagccccatc

SEQ ID NO: 646 - DNA, 1527 bp, Artificial Sequence
  Description of Artificial Sequence: Synthetic polynucleotide
atggctctgcctgtgacagctctgttgctgcctctggctctgctgctgcatgctgctagacctcaggtgcagctggtggagagcggcggcggcctggtgcagcccggcggcagcctgaggctgagctgcgccaccagcggcatcatcttccacatctacaccatgggctggtacaggggcgcccccggcaagcagagggagctggtggccaggatcaccagcggcggcgacaccaactacgccgacagcgtgaagggcaggttcaccatcagcagggacaacgtgaagaacaccatgtacctgcagatgaacagcctgaagcccgaggacaccgccgtgtactactgcaacaggttccccggcgccaccttcagctggggccagggcacccaggtgaccgtgagcagcgagcagaaactgatcagcgaggaagatctgaatcctggcggaggcggaggaagtggtggcggaggttctggtggcggtggatcaggcggtggcggatctggatctatggatatccagatgacccagtccccgagctccctgtccgcctctgtgggcgatagggtcaccatcacctgccgtgccagtcaggacatccgtaattatctgaactggtatcaacagaaaccaggaaaagctccgaaactactgatttactatacctcccgcctggagtctggagtcccttctcgcttctctggttctggttctgggacggattacactctgaccatcagcagtctgcaaccggaagacttcgcaacttattactgtcagcaaggtaatactctgccgtggacgttcggacagggcaccaaggtggagatcaaaggcggcggcggaagtggaggaggaggctcaggcggaggagggagcgaggttcagctggtggagtctggcggtggcctggtgcagccagggggctcactccgtttgtcctgtgcagcttctggctactcctttaccggctacactatgaactgggtgcgtcaggccccaggtaagggcctggaatgggttgcactgattaatcctaccaaaggtgttagtacctacaaccagaagttcaaggaccgtttcactataagcgtagataaatccaaaaacacagcctacctgcaaatgaacagcctgcgtgctgaggacactgccgtctattattgtgctagaagcggatactacggcgatagtgactggtattttgacgtgtggggtcaaggaaccctggtcaccgtctcctcgacatctggcggcggaggatctctggaatctggacaggtgctgctggaaagcaacatcaaggtgctgcccacctggtctaccccagttcagcctatggctctgattgtgcttggcggagttgccggcctgctgctctttatcggcctgggcatcttcttttgcgtgcggtgcagacatcggcggagacaggctgagagaatgagccagatcaagcggctgctgagcgagaagaaaacctgtcagtgccctcaccggttccagaaaacatgcagccccatc

SEQ ID NO: 647 - DNA, 1542 bp, Artificial Sequence
  Description of Artificial Sequence: Synthetic polynucleotide
atggctctgcctgtgacagctctgttgctgcctctggctctgctgctgcatgctgctagacctcagctgcagctggtggagagcggcggcggcctggtgcaggccggcggcagcctgaggctgagctgcgccgtgagcggcaacatctgggtgttcaccgtgatggcctggtacaggcaggtgcccggcaagcagagggagctggtggccgccagcaccaacggcggcagcaccaactacgccgacagcgtgaagggcaggttcaccatcagcagggacaacgtgaagaacaccgtgtacctgcagatgaacagcctgaagcccgaggacaccgccgtgtactactgcaacaggcagaggaccgtgatcggcatgaaccccctggccccctggggccagggcacccaggtgaccgtgagcagcgagcagaaactgatcagcgaggaagatctgaatcctggcggaggcggaggaagtggtggcggaggttctggtggcggtggatcaggcggtggcggatctggatctatggatatccagatgacccagtccccgagctccctgtccgcctctgtgggcgatagggtcaccatcacctgccgtgccagtcaggacatccgtaattatctgaactggtatcaacagaaaccaggaaaagctccgaaactactgatttactatacctcccgcctggagtctggagtcccttctcgcttctctggttctggttctgggacggattacactctgaccatcagcagtctgcaaccggaagacttcgcaacttattactgtcagcaaggtaatactctgccgtggacgttcggacagggcaccaaggtggagatcaaaggcggcggcggaagtggaggaggaggctcaggcggaggagggagcgaggttcagctggtggagtctggcggtggcctggtgcagccagggggctcactccgtttgtcctgtgcagcttctggctactcctttaccggctacactatgaactgggtgcgtcaggccccaggtaagggcctggaatgggttgcactgattaatcctaccaaaggtgttagtacctacaaccagaagttcaaggaccgtttcactataagcgtagataaatccaaaaacacagcctacctgcaaatgaacagcctgcgtgctgaggacactgccgtctattattgtgctagaagcggatactacggcgatagtgactggtattttgacgtgtggggtcaaggaaccctggtcaccgtctcctcgacatctggcggcggaggatctctggaatctggacaggtgctgctggaaagcaacatcaaggtgctgcccacctggtctaccccagttcagcctatggctctgattgtgcttggcggagttgccggcctgctgctctttatcggcctgggcatcttcttttgcgtgcggtgcagacatcggcggagacaggctgagagaatgagccagatcaagcggctgctgagcgagaagaaaacctgtcagtgccctcaccggttccagaaaacatgcagccccatc

SEQ ID NO: 648 - DNA, 1899 bp, Artificial Sequence
  Description of Artificial Sequence: Synthetic polynucleotide
atggctctgcctgtgacagctctgttgctgcctctggctctgctgctgcatgctgctagacctgaggtgaagctggtggagagcggcggcggcctggtgcagcccggcggcagcctgaagctgagctgcgccgccagcggcttcaccttcagcagctacggcctgagctgggtgaggcagacccccgacaagggcctggagctggtggccagcatcaacaggaacggcggcaacacctactacaccgacagcgtgaagggcaggttcaccatcagcagggacaacgccaagaacaccctgaacctgcagatgagcagcctgaagagcgaggacaccgccatgtactactgcgccaggggcggcttcacctactggggccagggcaccctggtgaccgtgagcgccggcagcaccagcggcagcggcaagcccggcagcggcgagggcagcaccaagggccagatcgtgctgacccagagccccgccatcatgagcgccttccccggcgagaaggtgaccatgacctgcagcgccagcagcagcgtgggctacatgtactggtaccagcagaagcccggcagcagccccaggctgctgatctacgacaccagcaacctggccagcggcgtgcccgtgaggttcagcggcagcggcagcggcaccgcctacagcctgaccatcagcaggatggaggccgaggacgccgccacctactactgccagcagtggagcggctacccccccatcaccttcggcgccggcaccaagctggagctgaaggagcagaaactgatcagcgaggaagatctgaatcctggcggaggcggaggaagtggtggcggaggttctggtggcggtggatcaggcggtggcggatctggatctatggatatccagatgacccagtccccgagctccctgtccgcctctgtgggcgatagggtcaccatcacctgccgtgccagtcaggacatccgtaattatctgaactggtatcaacagaaaccaggaaaagctccgaaactactgatttactatacctcccgcctggagtctggagtcccttctcgcttctctggttctggttctgggacggattacactctgaccatcagcagtctgcaaccggaagacttcgcaacttattactgtcagcaaggtaatactctgccgtggacgttcggacagggcaccaaggtggagatcaaaggcggcggcggaagtggaggaggaggctcaggcggaggagggagcgaggttcagctggtggagtctggcggtggcctggtgcagccagggggctcactccgtttgtcctgtgcagcttctggctactcctttaccggctacactatgaactgggtgcgtcaggccccaggtaagggcctggaatgggttgcactgattaatccttataaaggtgttagtacctacaaccagaagttcaaggaccgtttcactataagcgtagataaatccaaaaacacagcctacctgcaaatgaacagcctgcgtgctgaggacactgccgtctattattgtgctagaagcggatactacggcgatagtgactggtattttgacgtgtggggtcaaggaaccctggtcaccgtctcctcgacatctggcggcggaggatctctggaatctggacaggtgctgctggaaagcaacatcaaggtgctgcccacctggtctaccccagttcagcctatggctctgattgtgcttggcggagttgccggcctgctgctctttatcggcctgggcatcttcttttgcgtgcggtgcagacatcggcggagacaggctgagagaatgagccagatcaagcggctgctgagcgagaagaaaacctgtcagtgccctcaccggttccagaaaacatgcagccccatc

SEQ ID NO: 649 - DNA, 1899 bp, Artificial Sequence
  Description of Artificial Sequence: Synthetic polynucleotide
atggctctgcctgtgacagctctgttgctgcctctggctctgctgctgcatgctgctagacctcagatcgtgctgacccagagccccgccatcatgagcgccttccccggcgagaaggtgaccatgacctgcagcgccagcagcagcgtgggctacatgtactggtaccagcagaagcccggcagcagccccaggctgctgatctacgacaccagcaacctggccagcggcgtgcccgtgaggttcagcggcagcggcagcggcaccgcctacagcctgaccatcagcaggatggaggccgaggacgccgccacctactactgccagcagtggagcggctacccccccatcaccttcggcgccggcaccaagctggagctgaagggcagcaccagcggcagcggcaagcccggcagcggcgagggcagcaccaagggcgaggtgaagctggtggagagcggcggcggcctggtgcagcccggcggcagcctgaagctgagctgcgccgccagcggcttcaccttcagcagctacggcctgagctgggtgaggcagacccccgacaagggcctggagctggtggccagcatcaacaggaacggcggcaacacctactacaccgacagcgtgaagggcaggttcaccatcagcagggacaacgccaagaacaccctgaacctgcagatgagcagcctgaagagcgaggacaccgccatgtactactgcgccaggggcggcttcacctactggggccagggcaccctggtgaccgtgagcgccgagcagaaactgatcagcgaggaagatctgaatcctggcggaggcggaggaagtggtggcggaggttctggtggcggtggatcaggcggtggcggatctggatctatggatatccagatgacccagtccccgagctccctgtccgcctctgtgggcgatagggtcaccatcacctgccgtgccagtcaggacatccgtaattatctgaactggtatcaacagaaaccaggaaaagctccgaaactactgatttactatacctcccgcctggagtctggagtcccttctcgcttctctggttctggttctgggacggattacactctgaccatcagcagtctgcaaccggaagacttcgcaacttattactgtcagcaaggtaatactctgccgtggacgttcggacagggcaccaaggtggagatcaaaggcggcggcggaagtggaggaggaggctcaggcggaggagggagcgaggttcagctggtggagtctggcggtggcctggtgcagccagggggctcactccgtttgtcctgtgcagcttctggctactcctttaccggctacactatgaactgggtgcgtcaggccccaggtaagggcctggaatgggttgcactgattaatccttataaaggtgttagtacctacaaccagaagttcaaggaccgtttcactataagcgtagataaatccaaaaacacagcctacctgcaaatgaacagcctgcgtgctgaggacactgccgtctattattgtgctagaagcggatactacggcgatagtgactggtattttgacgtgtggggtcaaggaaccctggtcaccgtctcctcgacatctggcggcggaggatctctggaatctggacaggtgctgctggaaagcaacatcaaggtgctgcccacctggtctaccccagttcagcctatggctctgattgtgcttggcggagttgccggcctgctgctctttatcggcctgggcatcttcttttgcgtgcggtgcagacatcggcggagacaggctgagagaatgagccagatcaagcggctgctgagcgagaagaaaacctgtcagtgccctcaccggttccagaaaacatgcagccccatc

SEQ ID NO: 650 - DNA, 1899 bp, Artificial Sequence
  Description of Artificial Sequence: Synthetic polynucleotide
atggctctgcctgtgacagctctgttgctgcctctggctctgctgctgcatgctgctagacctcaggtgcagctgaaggagagcggcggcggcctggtgcagcccggcggcagcctgaagctgagctgcaccaccagcggcttcaccttcagcagctacggcctgagctggatcaggcagacccccgacaagaggctggagctggtggccagcatcaacaggaacggcgacaacacctactacaccgacagcgtgaggggcaggttcaccatcagcagggacaacgccaagagcaccctgaacctgcagatgagcagcctgaagagcgaggacaccgccatgtactactgcaccaggggcggcttcagctactggggccagggcaccctggtgaccgtgagcgccggcagcaccagcggcagcggcaagcccggcagcggcgagggcagcaccaagggccagatcgtgctgacccagagcccccccctgatgagcgccagccccggcgagaaggtgaccatgacctgcagcgccagcagcagcgtgggctacatgtactggttccagcagaggcccggcagcagccccaggctgctgatctacgacacctacaacctggccagcggcgtgcccgtgaggttcagcggcagcggcagcggcaccagctacagcctgaccatcagcaggctggaggccgaggacgccgccacctactactgccagcagtggagcggctacccccccatcaccttcggcgccggcaccaagctggagctgagggagcagaaactgatcagcgaggaagatctgaatcctggcggaggcggaggaagtggtggcggaggttctggtggcggtggatcaggcggtggcggatctggatctatggatatccagatgacccagtccccgagctccctgtccgcctctgtgggcgatagggtcaccatcacctgccgtgccagtcaggacatccgtaattatctgaactggtatcaacagaaaccaggaaaagctccgaaactactgatttactatacctcccgcctggagtctggagtcccttctcgcttctctggttctggttctgggacggattacactctgaccatcagcagtctgcaaccggaagacttcgcaacttattactgtcagcaaggtaatactctgccgtggacgttcggacagggcaccaaggtggagatcaaaggcggcggcggaagtggaggaggaggctcaggcggaggagggagcgaggttcagctggtggagtctggcggtggcctggtgcagccagggggctcactccgtttgtcctgtgcagcttctggctactcctttaccggctacactatgaactgggtgcgtcaggccccaggtaagggcctggaatgggttgcactgattaatccttataaaggtgttagtacctacaaccagaagttcaaggaccgtttcactataagcgtagataaatccaaaaacacagcctacctgcaaatgaacagcctgcgtgctgaggacactgccgtctattattgtgctagaagcggatactacggcgatagtgactggtattttgacgtgtggggtcaaggaaccctggtcaccgtctcctcgacatctggcggcggaggatctctggaatctggacaggtgctgctggaaagcaacatcaaggtgctgcccacctggtctaccccagttcagcctatggctctgattgtgcttggcggagttgccggcctgctgctctttatcggcctgggcatcttcttttgcgtgcggtgcagacatcggcggagacaggctgagagaatgagccagatcaagcggctgctgagcgagaagaaaacctgtcagtgccctcaccggttccagaaaacatgcagccccatc

SEQ ID NO: 651 - DNA, 1899 bp, Artificial Sequence
  Description of Artificial Sequence: Synthetic polynucleotide
atggctctgcctgtgacagctctgttgctgcctctggctctgctgctgcatgctgctagacctcagatcgtgctgacccagagcccccccctgatgagcgccagccccggcgagaaggtgaccatgacctgcagcgccagcagcagcgtgggctacatgtactggttccagcagaggcccggcagcagccccaggctgctgatctacgacacctacaacctggccagcggcgtgcccgtgaggttcagcggcagcggcagcggcaccagctacagcctgaccatcagcaggctggaggccgaggacgccgccacctactactgccagcagtggagcggctacccccccatcaccttcggcgccggcaccaagctggagctgaggggcagcaccagcggcagcggcaagcccggcagcggcgagggcagcaccaagggccaggtgcagctgaaggagagcggcggcggcctggtgcagcccggcggcagcctgaagctgagctgcaccaccagcggcttcaccttcagcagctacggcctgagctggatcaggcagacccccgacaagaggctggagctggtggccagcatcaacaggaacggcgacaacacctactacaccgacagcgtgaggggcaggttcaccatcagcagggacaacgccaagagcaccctgaacctgcagatgagcagcctgaagagcgaggacaccgccatgtactactgcaccaggggcggcttcagctactggggccagggcaccctggtgaccgtgagcgccgagcagaaactgatcagcgaggaagatctgaatcctggcggaggcggaggaagtggtggcggaggttctggtggcggtggatcaggcggtggcggatctggatctatggatatccagatgacccagtccccgagctccctgtccgcctctgtgggcgatagggtcaccatcacctgccgtgccagtcaggacatccgtaattatctgaactggtatcaacagaaaccaggaaaagctccgaaactactgatttactatacctcccgcctggagtctggagtcccttctcgcttctctggttctggttctgggacggattacactctgaccatcagcagtctgcaaccggaagacttcgcaacttattactgtcagcaaggtaatactctgccgtggacgttcggacagggcaccaaggtggagatcaaaggcggcggcggaagtggaggaggaggctcaggcggaggagggagcgaggttcagctggtggagtctggcggtggcctggtgcagccagggggctcactccgtttgtcctgtgcagcttctggctactcctttaccggctacactatgaactgggtgcgtcaggccccaggtaagggcctggaatgggttgcactgattaatccttataaaggtgttagtacctacaaccagaagttcaaggaccgtttcactataagcgtagataaatccaaaaacacagcctacctgcaaatgaacagcctgcgtgctgaggacactgccgtctattattgtgctagaagcggatactacggcgatagtgactggtattttgacgtgtggggtcaaggaaccctggtcaccgtctcctcgacatctggcggcggaggatctctggaatctggacaggtgctgctggaaagcaacatcaaggtgctgcccacctggtctaccccagttcagcctatggctctgattgtgcttggcggagttgccggcctgctgctctttatcggcctgggcatcttcttttgcgtgcggtgcagacatcggcggagacaggctgagagaatgagccagatcaagcggctgctgagcgagaagaaaacctgtcagtgccctcaccggttccagaaaacatgcagccccatc

SEQ ID NO: 652 - DNA, 1899 bp, Artificial Sequence
  Description of Artificial Sequence: Synthetic polynucleotide
atggctctgcctgtgacagctctgttgctgcctctggctctgctgctgcatgctgctagacctcaggtgcagctgaaggagagcggcggcggcctggtgaggcccggcggcagcctgaagctgagctgcgccgccagcggcttcaccttcagcaactacggcatgagctggatcaggcagacccccgacaagaacctggagctggtggccagcatcaacaccagcggcggcaacacctactaccccgacagcgtgaagggcaggttcaccatcagcagggacaacgccagggccaccctgaacctgcagatgagcaacctgaagagcgaggacaccgccatctactactgcaccaggggcggcttcacccactggggccagggcaccctggtggccgtgagcgccggcagcaccagcggcagcggcaagcccggcagcggcgagggcagcaccaagggccagatcgtgctgacccagagccccgccatcatgagcgccagccccggcgagaaggtgaccatgacctgcagcgccagcagcagcgtgagctacatgtactggtaccagcagaagcccggcagcagccccaggctgctgatctacgacaccagcaacctggccagcggcgtgcccgtgaggttcagcggcagcggcagcggcaccagctacttcctgaccatcagcaggatggaggccgaggacgccgccacctactactgccagcagtggaccggctacccccccatcaccttcggcgccggcaccaagctggagctgagggagcagaaactgatcagcgaggaagatctgaatcctggcggaggcggaggaagtggtggcggaggttctggtggcggtggatcaggcggtggcggatctggatctatggatatccagatgacccagtccccgagctccctgtccgcctctgtgggcgatagggtcaccatcacctgccgtgccagtcaggacatccgtaattatctgaactggtatcaacagaaaccaggaaaagctccgaaactactgatttactatacctcccgcctggagtctggagtcccttctcgcttctctggttctggttctgggacggattacactctgaccatcagcagtctgcaaccggaagacttcgcaacttattactgtcagcaaggtaatactctgccgtggacgttcggacagggcaccaaggtggagatcaaaggcggcggcggaagtggaggaggaggctcaggcggaggagggagcgaggttcagctggtggagtctggcggtggcctggtgcagccagggggctcactccgtttgtcctgtgcagcttctggctactcctttaccggctacactatgaactgggtgcgtcaggccccaggtaagggcctggaatgggttgcactgattaatccttataaaggtgttagtacctacaaccagaagttcaaggaccgtttcactataagcgtagataaatccaaaaacacagcctacctgcaaatgaacagcctgcgtgctgaggacactgccgtctattattgtgctagaagcggatactacggcgatagtgactggtattttgacgtgtggggtcaaggaaccctggtcaccgtctcctcgacatctggcggcggaggatctctggaatctggacaggtgctgctggaaagcaacatcaaggtgctgcccacctggtctaccccagttcagcctatggctctgattgtgcttggcggagttgccggcctgctgctctttatcggcctgggcatcttcttttgcgtgcggtgcagacatcggcggagacaggctgagagaatgagccagatcaagcggctgctgagcgagaagaaaacctgtcagtgccctcaccggttccagaaaacatgcagccccatc

SEQ ID NO: 653 - DNA, 1899 bp, Artificial Sequence
  Description of Artificial Sequence: Synthetic polynucleotide
atggctctgcctgtgacagctctgttgctgcctctggctctgctgctgcatgctgctagacctcagatcgtgctgacccagagccccgccatcatgagcgccagccccggcgagaaggtgaccatgacctgcagcgccagcagcagcgtgagctacatgtactggtaccagcagaagcccggcagcagccccaggctgctgatctacgacaccagcaacctggccagcggcgtgcccgtgaggttcagcggcagcggcagcggcaccagctacttcctgaccatcagcaggatggaggccgaggacgccgccacctactactgccagcagtggaccggctacccccccatcaccttcggcgccggcaccaagctggagctgaggggcagcaccagcggcagcggcaagcccggcagcggcgagggcagcaccaagggccaggtgcagctgaaggagagcggcggcggcctggtgaggcccggcggcagcctgaagctgagctgcgccgccagcggcttcaccttcagcaactacggcatgagctggatcaggcagacccccgacaagaacctggagctggtggccagcatcaacaccagcggcggcaacacctactaccccgacagcgtgaagggcaggttcaccatcagcagggacaacgccagggccaccctgaacctgcagatgagcaacctgaagagcgaggacaccgccatctactactgcaccaggggcggcttcacccactggggccagggcaccctggtggccgtgagcgccgagcagaaactgatcagcgaggaagatctgaatcctggcggaggcggaggaagtggtggcggaggttctggtggcggtggatcaggcggtggcggatctggatctatggatatccagatgacccagtccccgagctccctgtccgcctctgtgggcgatagggtcaccatcacctgccgtgccagtcaggacatccgtaattatctgaactggtatcaacagaaaccaggaaaagctccgaaactactgatttactatacctcccgcctggagtctggagtcccttctcgcttctctggttctggttctgggacggattacactctgaccatcagcagtctgcaaccggaagacttcgcaacttattactgtcagcaaggtaatactctgccgtggacgttcggacagggcaccaaggtggagatcaaaggcggcggcggaagtggaggaggaggctcaggcggaggagggagcgaggttcagctggtggagtctggcggtggcctggtgcagccagggggctcactccgtttgtcctgtgcagcttctggctactcctttaccggctacactatgaactgggtgcgtcaggccccaggtaagggcctggaatgggttgcactgattaatccttataaaggtgttagtacctacaaccagaagttcaaggaccgtttcactataagcgtagataaatccaaaaacacagcctacctgcaaatgaacagcctgcgtgctgaggacactgccgtctattattgtgctagaagcggatactacggcgatagtgactggtattttgacgtgtggggtcaaggaaccctggtcaccgtctcctcgacatctggcggcggaggatctctggaatctggacaggtgctgctggaaagcaacatcaaggtgctgcccacctggtctaccccagttcagcctatggctctgattgtgcttggcggagttgccggcctgctgctctttatcggcctgggcatcttcttttgcgtgcggtgcagacatcggcggagacaggctgagagaatgagccagatcaagcggctgctgagcgagaagaaaacctgtcagtgccctcaccggttccagaaaacatgcagccccatc

SEQ ID NO: 654 - DNA, 1899 bp, Artificial Sequence
  Description of Artificial Sequence: Synthetic polynucleotide
atggctctgcctgtgacagctctgttgctgcctctggctctgctgctgcatgctgctagacctcaggtgcagctgaaggagagcggcggcggcctggtgcagcccggcggcagcctgaagctgagctgcgccgccagcggcttccccttcagcagctacggcctgagctgggtgaggcagacccccgacaagaggctggagctggtggccaccatcaacaggaacggcgacagcgcctactaccccgacagcgtgaagggcaggttcaccatcagcagggacgacgccaagaacaccctgtacctgcagatgagcagcctgaagagcgaggacaccgccatgtactactgcaccaggggcggcttcgcctactggggccagggcaccctggtgaccgtgagcgccggcagcaccagcggcagcggcaagcccggcagcggcgagggcagcaccaagggccagatcgtgctgacccagagccccgccatcatgagcgccagccccggcgagaaggtgaccatgacctgcagcggcagcagcagcgtgggctacatgtactggtaccagcagaagcccggcttcagccccaggctgctgatctacgacaccagcaacctggccagcggcgtgcccgtgaggttcagcggcagcggcagcggcaccagctacagcctgaccatcagcaggatggaggccgaggacgccgccacctactactgccagcagtggagcggctacccccccatcaccttcggcgccggcaccaagctggagctgaaggagcagaaactgatcagcgaggaagatctgaatcctggcggaggcggaggaagtggtggcggaggttctggtggcggtggatcaggcggtggcggatctggatctatggatatccagatgacccagtccccgagctccctgtccgcctctgtgggcgatagggtcaccatcacctgccgtgccagtcaggacatccgtaattatctgaactggtatcaacagaaaccaggaaaagctccgaaactactgatttactatacctcccgcctggagtctggagtcccttctcgcttctctggttctggttctgggacggattacactctgaccatcagcagtctgcaaccggaagacttcgcaacttattactgtcagcaaggtaatactctgccgtggacgttcggacagggcaccaaggtggagatcaaaggcggcggcggaagtggaggaggaggctcaggcggaggagggagcgaggttcagctggtggagtctggcggtggcctggtgcagccagggggctcactccgtttgtcctgtgcagcttctggctactcctttaccggctacactatgaactgggtgcgtcaggccccaggtaagggcctggaatgggttgcactgattaatccttataaaggtgttagtacctacaaccagaagttcaaggaccgtttcactataagcgtagataaatccaaaaacacagcctacctgcaaatgaacagcctgcgtgctgaggacactgccgtctattattgtgctagaagcggatactacggcgatagtgactggtattttgacgtgtggggtcaaggaaccctggtcaccgtctcctcgacatctggcggcggaggatctctggaatctggacaggtgctgctggaaagcaacatcaaggtgctgcccacctggtctaccccagttcagcctatggctctgattgtgcttggcggagttgccggcctgctgctctttatcggcctgggcatcttcttttgcgtgcggtgcagacatcggcggagacaggctgagagaatgagccagatcaagcggctgctgagcgagaagaaaacctgtcagtgccctcaccggttccagaaaacatgcagccccatc

SEQ ID NO: 655 - DNA, 1899 bp, Artificial Sequence
  Description of Artificial Sequence: Synthetic polynucleotide
atggctctgcctgtgacagctctgttgctgcctctggctctgctgctgcatgctgctagacctcagatcgtgctgacccagagccccgccatcatgagcgccagccccggcgagaaggtgaccatgacctgcagcggcagcagcagcgtgggctacatgtactggtaccagcagaagcccggcttcagccccaggctgctgatctacgacaccagcaacctggccagcggcgtgcccgtgaggttcagcggcagcggcagcggcaccagctacagcctgaccatcagcaggatggaggccgaggacgccgccacctactactgccagcagtggagcggctacccccccatcaccttcggcgccggcaccaagctggagctgaagggcagcaccagcggcagcggcaagcccggcagcggcgagggcagcaccaagggccaggtgcagctgaaggagagcggcggcggcctggtgcagcccggcggcagcctgaagctgagctgcgccgccagcggcttccccttcagcagctacggcctgagctgggtgaggcagacccccgacaagaggctggagctggtggccaccatcaacaggaacggcgacagcgcctactaccccgacagcgtgaagggcaggttcaccatcagcagggacgacgccaagaacaccctgtacctgcagatgagcagcctgaagagcgaggacaccgccatgtactactgcaccaggggcggcttcgcctactggggccagggcaccctggtgaccgtgagcgccgagcagaaactgatcagcgaggaagatctgaatcctggcggaggcggaggaagtggtggcggaggttctggtggcggtggatcaggcggtggcggatctggatctatggatatccagatgacccagtccccgagctccctgtccgcctctgtgggcgatagggtcaccatcacctgccgtgccagtcaggacatccgtaattatctgaactggtatcaacagaaaccaggaaaagctccgaaactactgatttactatacctcccgcctggagtctggagtcccttctcgcttctctggttctggttctgggacggattacactctgaccatcagcagtctgcaaccggaagacttcgcaacttattactgtcagcaaggtaatactctgccgtggacgttcggacagggcaccaaggtggagatcaaaggcggcggcggaagtggaggaggaggctcaggcggaggagggagcgaggttcagctggtggagtctggcggtggcctggtgcagccagggggctcactccgtttgtcctgtgcagcttctggctactcctttaccggctacactatgaactgggtgcgtcaggccccaggtaagggcctggaatgggttgcactgattaatccttataaaggtgttagtacctacaaccagaagttcaaggaccgtttcactataagcgtagataaatccaaaaacacagcctacctgcaaatgaacagcctgcgtgctgaggacactgccgtctattattgtgctagaagcggatactacggcgatagtgactggtattttgacgtgtggggtcaaggaaccctggtcaccgtctcctcgacatctggcggcggaggatctctggaatctggacaggtgctgctggaaagcaacatcaaggtgctgcccacctggtctaccccagttcagcctatggctctgattgtgcttggcggagttgccggcctgctgctctttatcggcctgggcatcttcttttgcgtgcggtgcagacatcggcggagacaggctgagagaatgagccagatcaagcggctgctgagcgagaagaaaacctgtcagtgccctcaccggttccagaaaacatgcagccccatc

SEQ ID NO: 656 - DNA, 1527 bp, Artificial Sequence
  Description of Artificial Sequence: Synthetic polynucleotide
atggctctgcctgtgacagctctgttgctgcctctggctctgctgctgcatgctgctagacctcaggtgcagctgcaggagagcggcggcggcctggtgcagcccggcggcagcctgaggctgagctgcgccgccagcaggagcatcttcggcatcgccttcatggactggtacaggcaggcccccggcaagcagagggagttcgtggccggcatcagccacagcggcgccaccagctacgccgacagcgtgaagggcaggttcaccgtgagcagggacaacgccaagaacaccatgtacctgcagatgaacaacctgctgcccgaggacagcgccgtgtactactgcaaggccgacaccgccaccaacaccgactggggccagggcacccaggtgaccgtgagcagcgagcagaaactgatcagcgaggaagatctgaatcctggcggaggcggaggaagtggtggcggaggttctggtggcggtggatcaggcggtggcggatctggatctatggatatccagatgacccagtccccgagctccctgtccgcctctgtgggcgatagggtcaccatcacctgccgtgccagtcaggacatccgtaattatctgaactggtatcaacagaaaccaggaaaagctccgaaactactgatttactatacctcccgcctggagtctggagtcccttctcgcttctctggttctggttctgggacggattacactctgaccatcagcagtctgcaaccggaagacttcgcaacttattactgtcagcaaggtaatactctgccgtggacgttcggacagggcaccaaggtggagatcaaaggcggcggcggaagtggaggaggaggctcaggcggaggagggagcgaggttcagctggtggagtctggcggtggcctggtgcagccagggggctcactccgtttgtcctgtgcagcttctggctactcctttaccggctacactatgaactgggtgcgtcaggccccaggtaagggcctggaatgggttgcactgattaatccttataaaggtgttagtacctacaaccagaagttcaaggaccgtttcactataagcgtagataaatccaaaaacacagcctacctgcaaatgaacagcctgcgtgctgaggacactgccgtctattattgtgctagaagcggatactacggcgatagtgactggtattttgacgtgtggggtcaaggaaccctggtcaccgtctcctcgacatctggcggcggaggatctctggaatctggacaggtgctgctggaaagcaacatcaaggtgctgcccacctggtctaccccagttcagcctatggctctgattgtgcttggcggagttgccggcctgctgctctttatcggcctgggcatcttcttttgcgtgcggtgcagacatcggcggagacaggctgagagaatgagccagatcaagcggctgctgagcgagaagaaaacctgtcagtgccctcaccggttccagaaaacatgcagccccatc

SEQ ID NO: 657 - DNA, 1527 bp, Artificial Sequence
  Description of Artificial Sequence: Synthetic polynucleotide
atggctctgcctgtgacagctctgttgctgcctctggctctgctgctgcatgctgctagacctgaggtgcagctggtggagagcggcggcggcctggtgcagcccggcggcagcctgaggctgagctgcgccgccagcaggagcatcttcgtgatcgccttcatggactggtacaggcaggcccccggcaagcagagggagttcgtggccggcatcagcagcagcggcgccaccagctacgccagcagcgtgaagggcaggttcaccgtgagcagggacaccgccaagaacaccatgtacctgcagatgaacaacctgctgcccgaggacagcgccgtgtactactgcaaggccgacaccgccaccaccaccgactggggccagggcacccaggtgaccgtgagcagcgagcagaaactgatcagcgaggaagatctgaatcctggcggaggcggaggaagtggtggcggaggttctggtggcggtggatcaggcggtggcggatctggatctatggatatccagatgacccagtccccgagctccctgtccgcctctgtgggcgatagggtcaccatcacctgccgtgccagtcaggacatccgtaattatctgaactggtatcaacagaaaccaggaaaagctccgaaactactgatttactatacctcccgcctggagtctggagtcccttctcgcttctctggttctggttctgggacggattacactctgaccatcagcagtctgcaaccggaagacttcgcaacttattactgtcagcaaggtaatactctgccgtggacgttcggacagggcaccaaggtggagatcaaaggcggcggcggaagtggaggaggaggctcaggcggaggagggagcgaggttcagctggtggagtctggcggtggcctggtgcagccagggggctcactccgtttgtcctgtgcagcttctggctactcctttaccggctacactatgaactgggtgcgtcaggccccaggtaagggcctggaatgggttgcactgattaatccttataaaggtgttagtacctacaaccagaagttcaaggaccgtttcactataagcgtagataaatccaaaaacacagcctacctgcaaatgaacagcctgcgtgctgaggacactgccgtctattattgtgctagaagcggatactacggcgatagtgactggtattttgacgtgtggggtcaaggaaccctggtcaccgtctcctcgacatctggcggcggaggatctctggaatctggacaggtgctgctggaaagcaacatcaaggtgctgcccacctggtctaccccagttcagcctatggctctgattgtgcttggcggagttgccggcctgctgctctttatcggcctgggcatcttcttttgcgtgcggtgcagacatcggcggagacaggctgagagaatgagccagatcaagcggctgctgagcgagaagaaaacctgtcagtgccctcaccggttccagaaaacatgcagccccatc

SEQ ID NO: 658 - DNA, 1542 bp, Artificial Sequence
  Description of Artificial Sequence: Synthetic polynucleotide
atggctctgcctgtgacagctctgttgctgcctctggctctgctgctgcatgctgctagacctgaggtgcagctggtggagagcggcggcggcctggtgcagcccggcggcagcctgaggctgagctgcgccgccagcggcatcatcttcagcatcaacaccatggcctggtacaggcagggccccggcaaggagagggacctggtggccgtgatcaagggcgacggcagcaccagctacgccgacagcgtgaacggcaggttcaccatcagcagggacaacgccaagaacaccgtgtacctgaggatgaacggcctgaagcccgaggacaccgccgtgtactactgcaacagcgccggcaggagctacagcggcgtgtacggcgcctactggggccagggcacccaggtgaccgtgagcagcgagcagaaactgatcagcgaggaagatctgaatcctggcggaggcggaggaagtggtggcggaggttctggtggcggtggatcaggcggtggcggatctggatctatggatatccagatgacccagtccccgagctccctgtccgcctctgtgggcgatagggtcaccatcacctgccgtgccagtcaggacatccgtaattatctgaactggtatcaacagaaaccaggaaaagctccgaaactactgatttactatacctcccgcctggagtctggagtcccttctcgcttctctggttctggttctgggacggattacactctgaccatcagcagtctgcaaccggaagacttcgcaacttattactgtcagcaaggtaatactctgccgtggacgttcggacagggcaccaaggtggagatcaaaggcggcggcggaagtggaggaggaggctcaggcggaggagggagcgaggttcagctggtggagtctggcggtggcctggtgcagccagggggctcactccgtttgtcctgtgcagcttctggctactcctttaccggctacactatgaactgggtgcgtcaggccccaggtaagggcctggaatgggttgcactgattaatccttataaaggtgttagtacctacaaccagaagttcaaggaccgtttcactataagcgtagataaatccaaaaacacagcctacctgcaaatgaacagcctgcgtgctgaggacactgccgtctattattgtgctagaagcggatactacggcgatagtgactggtattttgacgtgtggggtcaaggaaccctggtcaccgtctcctcgacatctggcggcggaggatctctggaatctggacaggtgctgctggaaagcaacatcaaggtgctgcccacctggtctaccccagttcagcctatggctctgattgtgcttggcggagttgccggcctgctgctctttatcggcctgggcatcttcttttgcgtgcggtgcagacatcggcggagacaggctgagagaatgagccagatcaagcggctgctgagcgagaagaaaacctgtcagtgccctcaccggttccagaaaacatgcagccccatc

SEQ ID NO: 659 - DNA, 1542 bp, Artificial Sequence
  Description of Artificial Sequence: Synthetic polynucleotide
atggctctgcctgtgacagctctgttgctgcctctggctctgctgctgcatgctgctagacctgaggtgcagctgcaggagagcggcggcggcctggtgcagcccggcggcagcctgaagctgagctgcgccgccagcggcagcatcttcagcatcggcgccatgaggtggtacaggcaggtgcccggcaacgagagggagctggtggccggcatcaccaacggcggcaacaccaactacgccgacagcgtgaaggccaggttcaccatcagcagggacaacgccaagaacaccgtgtacctgcagatgaacagcctgaagcccgaggacaccaccgtgtacttctgcaacgccgacgtgcagaacagcggctacgtgtggggcaactactggggccagggcacccaggtgaccgtgagcagcgagcagaaactgatcagcgaggaagatctgaatcctggcggaggcggaggaagtggtggcggaggttctggtggcggtggatcaggcggtggcggatctggatctatggatatccagatgacccagtccccgagctccctgtccgcctctgtgggcgatagggtcaccatcacctgccgtgccagtcaggacatccgtaattatctgaactggtatcaacagaaaccaggaaaagctccgaaactactgatttactatacctcccgcctggagtctggagtcccttctcgcttctctggttctggttctgggacggattacactctgaccatcagcagtctgcaaccggaagacttcgcaacttattactgtcagcaaggtaatactctgccgtggacgttcggacagggcaccaaggtggagatcaaaggcggcggcggaagtggaggaggaggctcaggcggaggagggagcgaggttcagctggtggagtctggcggtggcctggtgcagccagggggctcactccgtttgtcctgtgcagcttctggctactcctttaccggctacactatgaactgggtgcgtcaggccccaggtaagggcctggaatgggttgcactgattaatccttataaaggtgttagtacctacaaccagaagttcaaggaccgtttcactataagcgtagataaatccaaaaacacagcctacctgcaaatgaacagcctgcgtgctgaggacactgccgtctattattgtgctagaagcggatactacggcgatagtgactggtattttgacgtgtggggtcaaggaaccctggtcaccgtctcctcgacatctggcggcggaggatctctggaatctggacaggtgctgctggaaagcaacatcaaggtgctgcccacctggtctaccccagttcagcctatggctctgattgtgcttggcggagttgccggcctgctgctctttatcggcctgggcatcttcttttgcgtgcggtgcagacatcggcggagacaggctgagagaatgagccagatcaagcggctgctgagcgagaagaaaacctgtcagtgccctcaccggttccagaaaacatgcagccccatc

SEQ ID NO: 660 - DNA, 1527 bp, Artificial Sequence
  Description of Artificial Sequence: Synthetic polynucleotide
atggctctgcctgtgacagctctgttgctgcctctggctctgctgctgcatgctgctagacctgaggtgcagctggtggagagcggcggcggcctggtgcagcccggcggcagcctgaggctgagctgcgccgccagcaggagcatcttcgtgatcgccttcatggactggtacaggcaggcccccggcaagcagagggagttcgtggccggcatcagcagcagcggcgccaccagctacgccgacagcgtgaagggcaggttcaccgtgagcagggacaccgccaagaacaccatgtacctgcagatgaacaacctgctgcccgaggacagcgccgtgtactactgcaaggccgacaccgccaccaacaccgactggggccagggcacccaggtgaccgtgagcagcgagcagaaactgatcagcgaggaagatctgaatcctggcggaggcggaggaagtggtggcggaggttctggtggcggtggatcaggcggtggcggatctggatctatggatatccagatgacccagtccccgagctccctgtccgcctctgtgggcgatagggtcaccatcacctgccgtgccagtcaggacatccgtaattatctgaactggtatcaacagaaaccaggaaaagctccgaaactactgatttactatacctcccgcctggagtctggagtcccttctcgcttctctggttctggttctgggacggattacactctgaccatcagcagtctgcaaccggaagacttcgcaacttattactgtcagcaaggtaatactctgccgtggacgttcggacagggcaccaaggtggagatcaaaggcggcggcggaagtggaggaggaggctcaggcggaggagggagcgaggttcagctggtggagtctggcggtggcctggtgcagccagggggctcactccgtttgtcctgtgcagcttctggctactcctttaccggctacactatgaactgggtgcgtcaggccccaggtaagggcctggaatgggttgcactgattaatccttataaaggtgttagtacctacaaccagaagttcaaggaccgtttcactataagcgtagataaatccaaaaacacagcctacctgcaaatgaacagcctgcgtgctgaggacactgccgtctattattgtgctagaagcggatactacggcgatagtgactggtattttgacgtgtggggtcaaggaaccctggtcaccgtctcctcgacatctggcggcggaggatctctggaatctggacaggtgctgctggaaagcaacatcaaggtgctgcccacctggtctaccccagttcagcctatggctctgattgtgcttggcggagttgccggcctgctgctctttatcggcctgggcatcttcttttgcgtgcggtgcagacatcggcggagacaggctgagagaatgagccagatcaagcggctgctgagcgagaagaaaacctgtcagtgccctcaccggttccagaaaacatgcagccccatc

SEQ ID NO: 661 - DNA, 1527 bp, Artificial Sequence
  Description of Artificial Sequence: Synthetic polynucleotide
atggctctgcctgtgacagctctgttgctgcctctggctctgctgctgcatgctgctagacctcaggtgcagctggtggagagcggcggcggcctggtgcagcccggcggcagcctgaggctgagctgcgccaccagcggcatcatcttccacatctacaccatgggctggtacaggggcgcccccggcaagcagagggagctggtggccaggatcaccagcggcggcgacaccaactacgccgacagcgtgaagggcaggttcaccatcagcagggacaacgtgaagaacaccatgtacctgcagatgaacagcctgaagcccgaggacaccgccgtgtactactgcaacaggttccccggcgccaccttcagctggggccagggcacccaggtgaccgtgagcagcgagcagaaactgatcagcgaggaagatctgaatcctggcggaggcggaggaagtggtggcggaggttctggtggcggtggatcaggcggtggcggatctggatctatggatatccagatgacccagtccccgagctccctgtccgcctctgtgggcgatagggtcaccatcacctgccgtgccagtcaggacatccgtaattatctgaactggtatcaacagaaaccaggaaaagctccgaaactactgatttactatacctcccgcctggagtctggagtcccttctcgcttctctggttctggttctgggacggattacactctgaccatcagcagtctgcaaccggaagacttcgcaacttattactgtcagcaaggtaatactctgccgtggacgttcggacagggcaccaaggtggagatcaaaggcggcggcggaagtggaggaggaggctcaggcggaggagggagcgaggttcagctggtggagtctggcggtggcctggtgcagccagggggctcactccgtttgtcctgtgcagcttctggctactcctttaccggctacactatgaactgggtgcgtcaggccccaggtaagggcctggaatgggttgcactgattaatccttataaaggtgttagtacctacaaccagaagttcaaggaccgtttcactataagcgtagataaatccaaaaacacagcctacctgcaaatgaacagcctgcgtgctgaggacactgccgtctattattgtgctagaagcggatactacggcgatagtgactggtattttgacgtgtggggtcaaggaaccctggtcaccgtctcctcgacatctggcggcggaggatctctggaatctggacaggtgctgctggaaagcaacatcaaggtgctgcccacctggtctaccccagttcagcctatggctctgattgtgcttggcggagttgccggcctgctgctctttatcggcctgggcatcttcttttgcgtgcggtgcagacatcggcggagacaggctgagagaatgagccagatcaagcggctgctgagcgagaagaaaacctgtcagtgccctcaccggttccagaaaacatgcagccccatc

SEQ ID NO: 662 - DNA, 1542 bp, Artificial Sequence
  Description of Artificial Sequence: Synthetic polynucleotide
atggctctgcctgtgacagctctgttgctgcctctggctctgctgctgcatgctgctagacctcagctgcagctggtggagagcggcggcggcctggtgcaggccggcggcagcctgaggctgagctgcgccgtgagcggcaacatctgggtgttcaccgtgatggcctggtacaggcaggtgcccggcaagcagagggagctggtggccgccagcaccaacggcggcagcaccaactacgccgacagcgtgaagggcaggttcaccatcagcagggacaacgtgaagaacaccgtgtacctgcagatgaacagcctgaagcccgaggacaccgccgtgtactactgcaacaggcagaggaccgtgatcggcatgaaccccctggccccctggggccagggcacccaggtgaccgtgagcagcgagcagaaactgatcagcgaggaagatctgaatcctggcggaggcggaggaagtggtggcggaggttctggtggcggtggatcaggcggtggcggatctggatctatggatatccagatgacccagtccccgagctccctgtccgcctctgtgggcgatagggtcaccatcacctgccgtgccagtcaggacatccgtaattatctgaactggtatcaacagaaaccaggaaaagctccgaaactactgatttactatacctcccgcctggagtctggagtcccttctcgcttctctggttctggttctgggacggattacactctgaccatcagcagtctgcaaccggaagacttcgcaacttattactgtcagcaaggtaatactctgccgtggacgttcggacagggcaccaaggtggagatcaaaggcggcggcggaagtggaggaggaggctcaggcggaggagggagcgaggttcagctggtggagtctggcggtggcctggtgcagccagggggctcactccgtttgtcctgtgcagcttctggctactcctttaccggctacactatgaactgggtgcgtcaggccccaggtaagggcctggaatgggttgcactgattaatccttataaaggtgttagtacctacaaccagaagttcaaggaccgtttcactataagcgtagataaatccaaaaacacagcctacctgcaaatgaacagcctgcgtgctgaggacactgccgtctattattgtgctagaagcggatactacggcgatagtgactggtattttgacgtgtggggtcaaggaaccctggtcaccgtctcctcgacatctggcggcggaggatctctggaatctggacaggtgctgctggaaagcaacatcaaggtgctgcccacctggtctaccccagttcagcctatggctctgattgtgcttggcggagttgccggcctgctgctctttatcggcctgggcatcttcttttgcgtgcggtgcagacatcggcggagacaggctgagagaatgagccagatcaagcggctgctgagcgagaagaaaacctgtcagtgccctcaccggttccagaaaacatgcagccccatc

SEQ ID NO: 663 - DNA, 1527 bp, Artificial Sequence
  Description of Artificial Sequence: Synthetic polynucleotide
atggctctgcctgtgacagctctgttgctgcctctggctctgctgctgcatgctgctagacctcaggtgcagctggtggagagcggcggcggcctggtgcagcccggcggcagcctgaggctgagctgcgccgtgagcaggaacatcgccagcctgtacagggtggactggtacaggcaggcccccggcaagcagagggagctggtggccggcaggaccagcggcggcaccaccacctacctggacgccgtggagggcaggttcaccatcagcagggacaacgtgaaggacaccgtgtacctgcagatgaacagcctgacccccgaggacaccgccgtgtactactgccacgcccacgaccactggagggacagctggggccagggcacccaggtgaccgtgagcagcgagcagaaactgatcagcgaggaagatctgaatcctggcggaggcggaggaagtggtggcggaggttctggtggcggtggatcaggcggtggcggatctggatctatggatatccagatgacccagtccccgagctccctgtccgcctctgtgggcgatagggtcaccatcacctgccgtgccagtcaggacatccgtaattatctgaactggtatcaacagaaaccaggaaaagctccgaaactactgatttactatacctcccgcctggagtctggagtcccttctcgcttctctggttctggttctgggacggattacactctgaccatcagcagtctgcaaccggaagacttcgcaacttattactgtcagcaaggtaatactctgccgtggacgttcggacagggcaccaaggtggagatcaaaggcggcggcggaagtggaggaggaggctcaggcggaggagggagcgaggttcagctggtggagtctggcggtggcctggtgcagccagggggctcactccgtttgtcctgtgcagcttctggctactcctttaccggctacactatgaactgggtgcgtcaggccccaggtaagggcctggaatgggttgcactgattaatccttataaaggtgttagtacctacaaccagaagttcaaggaccgtttcactataagcgtagataaatccaaaaacacagcctacctgcaaatgaacagcctgcgtgctgaggacactgccgtctattattgtgctagaagcggatactacggcgatagtgactggtattttgacgtgtggggtcaaggaaccctggtcaccgtctcctcgacatctggcggcggaggatctctggaatctggacaggtgctgctggaaagcaacatcaaggtgctgcccacctggtctaccccagttcagcctatggctctgattgtgcttggcggagttgccggcctgctgctctttatcggcctgggcatcttcttttgcgtgcggtgcagacatcggcggagacaggctgagagaatgagccagatcaagcggctgctgagcgagaagaaaacctgtcagtgccctcaccggttccagaaaacatgcagccccatc

SEQ ID NO: 664 - DNA, 1527 bp, Artificial Sequence
  Description of Artificial Sequence: Synthetic polynucleotide
atggctctgcctgtgacagctctgttgctgcctctggctctgctgctgcatgctgctagacctgaggtgcagctggtggagagcggcggcggcctggtgcagcccggcggcagcctgaggctgagctgcgccgccagcaggaacatcttcagcctgtacagggtggactggtacaggcaggcccccggcaagcagagggagctggtggccggcagcaccagcggcggcaccaccacctacgccgacgccgtgaagggcaggttcaccatcagcaccgacaacgtgaaggacaccgtgtacctgcagatgaacagcctgacccccgaggacaccgccgtgtactactgccacgcccacgaccactggagggacagctggggccagggcacccaggtgaccgtgagcagcgagcagaaactgatcagcgaggaagatctgaatcctggcggaggcggaggaagtggtggcggaggttctggtggcggtggatcaggcggtggcggatctggatctatggatatccagatgacccagtccccgagctccctgtccgcctctgtgggcgatagggtcaccatcacctgccgtgccagtcaggacatccgtaattatctgaactggtatcaacagaaaccaggaaaagctccgaaactactgatttactatacctcccgcctggagtctggagtcccttctcgcttctctggttctggttctgggacggattacactctgaccatcagcagtctgcaaccggaagacttcgcaacttattactgtcagcaaggtaatactctgccgtggacgttcggacagggcaccaaggtggagatcaaaggcggcggcggaagtggaggaggaggctcaggcggaggagggagcgaggttcagctggtggagtctggcggtggcctggtgcagccagggggctcactccgtttgtcctgtgcagcttctggctactcctttaccggctacactatgaactgggtgcgtcaggccccaggtaagggcctggaatgggttgcactgattaatccttataaaggtgttagtacctacaaccagaagttcaaggaccgtttcactataagcgtagataaatccaaaaacacagcctacctgcaaatgaacagcctgcgtgctgaggacactgccgtctattattgtgctagaagcggatactacggcgatagtgactggtattttgacgtgtggggtcaaggaaccctggtcaccgtctcctcgacatctggcggcggaggatctctggaatctggacaggtgctgctggaaagcaacatcaaggtgctgcccacctggtctaccccagttcagcctatggctctgattgtgcttggcggagttgccggcctgctgctctttatcggcctgggcatcttcttttgcgtgcggtgcagacatcggcggagacaggctgagagaatgagccagatcaagcggctgctgagcgagaagaaaacctgtcagtgccctcaccggttccagaaaacatgcagccccatc

SEQ ID NO: 665 - DNA, 1932 bp, Artificial Sequence
  Description of Artificial Sequence: Synthetic polynucleotide
atggctctgcctgtgacagctctgttgctgcctctggctctgctgctgcatgctgctagacctcaggtgcagctggtgcagtctggggctgaggtgaagaagcctgggtcctcggtgaaggtctcctgcaaggcttctggaggcaccttcagcagctatgctatcagctgggtgcgacaggcccctggacaagggcttgagtggatgggagggatcatccctatctttggtacagcaaactacgcacagaagttccagggcagagtcacgattaccgcggacgaatccacgagcacagcctacatggagctgagcagcctgaggagcgaggacacggccgtgtattactgtgcgagagacatattacgattgagcgtgtcctcgggtatggacgtctggggccaagggaccctggtcaccgtgtcctcagggtcaacctctggtagcggtaagcctggctccggcgaaggctccacaaagggtcagtctgtgctgactcagccaccctcagcgtctgggacccccgggcagagggtcaccatctcttgttctggaagcagctccaacatcggaagtaattatgtatactggtaccagcagctcccaggaacggcccccaaactcctcatctataggaataatcagcggccctcaggggtccctgaccgactctctggctccaagtctggcacctcagcctccctggccatcagtgggctccggtccgaggatgaggctgattattactgtgcagcatgggatgacagcctgagtgctgtggtattcggcggagggaccaagctgaccgtcctagagcagaaactgatcagcgaggaagatctgaatcctggcggaggcggaggaagtggtggcggaggttctggtggcggtggatcaggcggtggcggatctggatctatggatatccagatgacccagtccccgagctccctgtccgcctctgtgggcgatagggtcaccatcacctgccgtgccagtcaggacatccgtaattatctgaactggtatcaacagaaaccaggaaaagctccgaaactactgatttactatacctcccgcctggagtctggagtcccttctcgcttctctggttctggttctgggacggattacactctgaccatcagcagtctgcaaccggaagacttcgcaacttattactgtcagcaaggtaatactctgccgtggacgttcggacagggcaccaaggtggagatcaaaggcggcggcggaagtggaggaggaggctcaggcggaggagggagcgaggttcagctggtggagtctggcggtggcctggtgcagccagggggctcactccgtttgtcctgtgcagcttctggctactcctttaccggctacactatgaactgggtgcgtcaggccccaggtaagggcctggaatgggttgcactgattaatccttataaaggtgttagtacctacaaccagaagttcaaggaccgtttcactataagcgtagataaatccaaaaacacagcctacctgcaaatgaacagcctgcgtgctgaggacactgccgtctattattgtgctagaagcggatactacggcgatagtgactggtattttgacgtgtggggtcaaggaaccctggtcaccgtctcctcgacatctggcggcggaggatctctggaatctggacaggtgctgctggaaagcaacatcaaggtgctgcccacctggtctaccccagttcagcctatggctctgattgtgcttggcggagttgccggcctgctgctctttatcggcctgggcatcttcttttgcgtgcggtgcagacatcggcggagacaggctgagagaatgagccagatcaagcggctgctgagcgagaagaaaacctgtcagtgccctcaccggttccagaaaacatgcagccccatc

SEQ ID NO: 666 - DNA, 1932 bp, Artificial Sequence
  Description of Artificial Sequence: Synthetic polynucleotide
atggctctgcctgtgacagctctgttgctgcctctggctctgctgctgcatgctgctagacctcagtctgtgctgactcagccaccctcagcgtctgggacccccgggcagagggtcaccatctcttgttctggaagcagctccaacatcggaagtaattatgtatactggtaccagcagctcccaggaacggcccccaaactcctcatctataggaataatcagcggccctcaggggtccctgaccgactctctggctccaagtctggcacctcagcctccctggccatcagtgggctccggtccgaggatgaggctgattattactgtgcagcatgggatgacagcctgagtgctgtggtattcggcggagggaccaagctgaccgtcctagggtcaacctctggtagcggtaagcctggctccggcgaaggctccacaaagggtcaggtgcagctggtgcagtctggggctgaggtgaagaagcctgggtcctcggtgaaggtctcctgcaaggcttctggaggcaccttcagcagctatgctatcagctgggtgcgacaggcccctggacaagggcttgagtggatgggagggatcatccctatctttggtacagcaaactacgcacagaagttccagggcagagtcacgattaccgcggacgaatccacgagcacagcctacatggagctgagcagcctgaggagcgaggacacggccgtgtattactgtgcgagagacatattacgattgagcgtgtcctcgggtatggacgtctggggccaagggaccctggtcaccgtgtcctcagagcagaaactgatcagcgaggaagatctgaatcctggcggaggcggaggaagtggtggcggaggttctggtggcggtggatcaggcggtggcggatctggatctatggatatccagatgacccagtccccgagctccctgtccgcctctgtgggcgatagggtcaccatcacctgccgtgccagtcaggacatccgtaattatctgaactggtatcaacagaaaccaggaaaagctccgaaactactgatttactatacctcccgcctggagtctggagtcccttctcgcttctctggttctggttctgggacggattacactctgaccatcagcagtctgcaaccggaagacttcgcaacttattactgtcagcaaggtaatactctgccgtggacgttcggacagggcaccaaggtggagatcaaaggcggcggcggaagtggaggaggaggctcaggcggaggagggagcgaggttcagctggtggagtctggcggtggcctggtgcagccagggggctcactccgtttgtcctgtgcagcttctggctactcctttaccggctacactatgaactgggtgcgtcaggccccaggtaagggcctggaatgggttgcactgattaatccttataaaggtgttagtacctacaaccagaagttcaaggaccgtttcactataagcgtagataaatccaaaaacacagcctacctgcaaatgaacagcctgcgtgctgaggacactgccgtctattattgtgctagaagcggatactacggcgatagtgactggtattttgacgtgtggggtcaaggaaccctggtcaccgtctcctcgacatctggcggcggaggatctctggaatctggacaggtgctgctggaaagcaacatcaaggtgctgcccacctggtctaccccagttcagcctatggctctgattgtgcttggcggagttgccggcctgctgctctttatcggcctgggcatcttcttttgcgtgcggtgcagacatcggcggagacaggctgagagaatgagccagatcaagcggctgctgagcgagaagaaaacctgtcagtgccctcaccggttccagaaaacatgcagccccatc

SEQ ID NO: 667 - DNA, 1935 bp, Artificial Sequence
  Description of Artificial Sequence: Synthetic polynucleotide
atggctctgcctgtgacagctctgttgctgcctctggctctgctgctgcatgctgctagacctcaggtgcagctgcaggagtcggggggaggcgtggtccagcctgggaggtccctgagactctcctgtgcagcctctggattcaccctcagtagctatggcatgcactgggtccgccaggctccaggcaaggggctggagtgggtggcagttatatcatatgatggaagtaataaatactatgcagactccgtgaagggccgattcaccatctccagagacaattccaagaacacgctgtatctgcaaatgaacagcctgagagctgaggacacggctgtgtattactgtgcgaagagcggctggagatattactactactacggtatggacgtctggggccaagggaccctggtcaccgtgtcctcagggtcaacctctggtagcggtaagcctggctccggcgaaggctccacaaagggtcagtctgtgttgacgcagccgccctcagtgtctggggccccagggcagagggtcaccatctcctgcactgggagcagctccaacatcggggcaggttatgatgtacactggtaccagcagcttccaggaacagcccccaaactcctcatctatggtaacagcaatcggccctcaggggtccctgaccgattctctggctccaagtctggcacctcagcctccctggccatcactgggctccaggctgaggatgaggctgattattactgccagtcctatgacagcagcctgagtggttcggtattcggcggagggaccaagctgaccgtcctagagcagaaactgatcagcgaggaagatctgaatcctggcggaggcggaggaagtggtggcggaggttctggtggcggtggatcaggcggtggcggatctggatctatggatatccagatgacccagtccccgagctccctgtccgcctctgtgggcgatagggtcaccatcacctgccgtgccagtcaggacatccgtaattatctgaactggtatcaacagaaaccaggaaaagctccgaaactactgatttactatacctcccgcctggagtctggagtcccttctcgcttctctggttctggttctgggacggattacactctgaccatcagcagtctgcaaccggaagacttcgcaacttattactgtcagcaaggtaatactctgccgtggacgttcggacagggcaccaaggtggagatcaaaggcggcggcggaagtggaggaggaggctcaggcggaggagggagcgaggttcagctggtggagtctggcggtggcctggtgcagccagggggctcactccgtttgtcctgtgcagcttctggctactcctttaccggctacactatgaactgggtgcgtcaggccccaggtaagggcctggaatgggttgcactgattaatccttataaaggtgttagtacctacaaccagaagttcaaggaccgtttcactataagcgtagataaatccaaaaacacagcctacctgcaaatgaacagcctgcgtgctgaggacactgccgtctattattgtgctagaagcggatactacggcgatagtgactggtattttgacgtgtggggtcaaggaaccctggtcaccgtctcctcgacatctggcggcggaggatctctggaatctggacaggtgctgctggaaagcaacatcaaggtgctgcccacctggtctaccccagttcagcctatggctctgattgtgcttggcggagttgccggcctgctgctctttatcggcctgggcatcttcttttgcgtgcggtgcagacatcggcggagacaggctgagagaatgagccagatcaagcggctgctgagcgagaagaaaacctgtcagtgccctcaccggttccagaaaacatgcagccccatc

SEQ ID NO: 668 - DNA, 1935 bp, Artificial Sequence
  Description of Artificial Sequence: Synthetic polynucleotide
atggctctgcctgtgacagctctgttgctgcctctggctctgctgctgcatgctgctagacctcagtctgtgttgacgcagccgccctcagtgtctggggccccagggcagagggtcaccatctcctgcactgggagcagctccaacatcggggcaggttatgatgtacactggtaccagcagcttccaggaacagcccccaaactcctcatctatggtaacagcaatcggccctcaggggtccctgaccgattctctggctccaagtctggcacctcagcctccctggccatcactgggctccaggctgaggatgaggctgattattactgccagtcctatgacagcagcctgagtggttcggtattcggcggagggaccaagctgaccgtcctagggtcaacctctggtagcggtaagcctggctccggcgaaggctccacaaagggtcaggtgcagctgcaggagtcggggggaggcgtggtccagcctgggaggtccctgagactctcctgtgcagcctctggattcaccctcagtagctatggcatgcactgggtccgccaggctccaggcaaggggctggagtgggtggcagttatatcatatgatggaagtaataaatactatgcagactccgtgaagggccgattcaccatctccagagacaattccaagaacacgctgtatctgcaaatgaacagcctgagagctgaggacacggctgtgtattactgtgcgaagagcggctggagatattactactactacggtatggacgtctggggccaagggaccctggtcaccgtgtcctcagagcagaaactgatcagcgaggaagatctgaatcctggcggaggcggaggaagtggtggcggaggttctggtggcggtggatcaggcggtggcggatctggatctatggatatccagatgacccagtccccgagctccctgtccgcctctgtgggcgatagggtcaccatcacctgccgtgccagtcaggacatccgtaattatctgaactggtatcaacagaaaccaggaaaagctccgaaactactgatttactatacctcccgcctggagtctggagtcccttctcgcttctctggttctggttctgggacggattacactctgaccatcagcagtctgcaaccggaagacttcgcaacttattactgtcagcaaggtaatactctgccgtggacgttcggacagggcaccaaggtggagatcaaaggcggcggcggaagtggaggaggaggctcaggcggaggagggagcgaggttcagctggtggagtctggcggtggcctggtgcagccagggggctcactccgtttgtcctgtgcagcttctggctactcctttaccggctacactatgaactgggtgcgtcaggccccaggtaagggcctggaatgggttgcactgattaatccttataaaggtgttagtacctacaaccagaagttcaaggaccgtttcactataagcgtagataaatccaaaaacacagcctacctgcaaatgaacagcctgcgtgctgaggacactgccgtctattattgtgctagaagcggatactacggcgatagtgactggtattttgacgtgtggggtcaaggaaccctggtcaccgtctcctcgacatctggcggcggaggatctctggaatctggacaggtgctgctggaaagcaacatcaaggtgctgcccacctggtctaccccagttcagcctatggctctgattgtgcttggcggagttgccggcctgctgctctttatcggcctgggcatcttcttttgcgtgcggtgcagacatcggcggagacaggctgagagaatgagccagatcaagcggctgctgagcgagaagaaaacctgtcagtgccctcaccggttccagaaaacatgcagccccatc

SEQ ID NO: 669 - DNA, 1917 bp, Artificial Sequence
  Description of Artificial Sequence: Synthetic polynucleotide
atggctctgcctgtgacagctctgttgctgcctctggctctgctgctgcatgctgctagacctgaggtgcagctgttggagtctgggggaggcttggtccagcctggggggtccctgagactctcctgtgcagcctctggattcacctttagtagctattggatgagctgggtccgccaggctccagggaaggggctggagtgggtggccaacataaagcaagatggaagtgagaaatactatgtggactctgtgaagggccgattcaccatctccagagacaacgccaagaactcactgtatctgcaaatgaacagcctgagagccgaggacacggctgtgtattactgtgcgagaccggcgggccagctgctctacggtatggacgtctggggccaagggaccctggtcaccgtgtcctcagggtcaacctctggtagcggtaagcctggctccggcgaaggctccacaaagggttcctatgtgctgactcagccaccctcggtgtcagtgtccccaggacagacggccaggatcacctgctctggagatgcattgccaaagcaatatgcttattggtaccagcagaagccaggccaggcccctgtgctggtgatatataaagacagtgagaggccctcagggatccctgagcgattctctggctccagctcagggacaacagtcacgttgaccatcagtggagtccaggcagaagacgaggctgactattactgtcaatcagcagacagcagtggtacttgggtgttcggcggaggcaccaagctgaccgtcctcgagcagaaactgatcagcgaggaagatctgaatcctggcggaggcggaggaagtggtggcggaggttctggtggcggtggatcaggcggtggcggatctggatctatggatatccagatgacccagtccccgagctccctgtccgcctctgtgggcgatagggtcaccatcacctgccgtgccagtcaggacatccgtaattatctgaactggtatcaacagaaaccaggaaaagctccgaaactactgatttactatacctcccgcctggagtctggagtcccttctcgcttctctggttctggttctgggacggattacactctgaccatcagcagtctgcaaccggaagacttcgcaacttattactgtcagcaaggtaatactctgccgtggacgttcggacagggcaccaaggtggagatcaaaggcggcggcggaagtggaggaggaggctcaggcggaggagggagcgaggttcagctggtggagtctggcggtggcctggtgcagccagggggctcactccgtttgtcctgtgcagcttctggctactcctttaccggctacactatgaactgggtgcgtcaggccccaggtaagggcctggaatgggttgcactgattaatccttataaaggtgttagtacctacaaccagaagttcaaggaccgtttcactataagcgtagataaatccaaaaacacagcctacctgcaaatgaacagcctgcgtgctgaggacactgccgtctattattgtgctagaagcggatactacggcgatagtgactggtattttgacgtgtggggtcaaggaaccctggtcaccgtctcctcgacatctggcggcggaggatctctggaatctggacaggtgctgctggaaagcaacatcaaggtgctgcccacctggtctaccccagttcagcctatggctctgattgtgcttggcggagttgccggcctgctgctctttatcggcctgggcatcttcttttgcgtgcggtgcagacatcggcggagacaggctgagagaatgagccagatcaagcggctgctgagcgagaagaaaacctgtcagtgccctcaccggttccagaaaacatgcagccccatc

SEQ ID NO: 670 - DNA, 1917 bp, Artificial Sequence
  Description of Artificial Sequence: Synthetic polynucleotide
atggctctgcctgtgacagctctgttgctgcctctggctctgctgctgcatgctgctagaccttcctatgtgctgactcagccaccctcggtgtcagtgtccccaggacagacggccaggatcacctgctctggagatgcattgccaaagcaatatgcttattggtaccagcagaagccaggccaggcccctgtgctggtgatatataaagacagtgagaggccctcagggatccctgagcgattctctggctccagctcagggacaacagtcacgttgaccatcagtggagtccaggcagaagacgaggctgactattactgtcaatcagcagacagcagtggtacttgggtgttcggcggaggcaccaagctgaccgtcctcgggtcaacctctggtagcggtaagcctggctccggcgaaggctccacaaagggtgaggtgcagctgttggagtctgggggaggcttggtccagcctggggggtccctgagactctcctgtgcagcctctggattcacctttagtagctattggatgagctgggtccgccaggctccagggaaggggctggagtgggtggccaacataaagcaagatggaagtgagaaatactatgtggactctgtgaagggccgattcaccatctccagagacaacgccaagaactcactgtatctgcaaatgaacagcctgagagccgaggacacggctgtgtattactgtgcgagaccggcgggccagctgctctacggtatggacgtctggggccaagggaccctggtcaccgtgtcctcagagcagaaactgatcagcgaggaagatctgaatcctggcggaggcggaggaagtggtggcggaggttctggtggcggtggatcaggcggtggcggatctggatctatggatatccagatgacccagtccccgagctccctgtccgcctctgtgggcgatagggtcaccatcacctgccgtgccagtcaggacatccgtaattatctgaactggtatcaacagaaaccaggaaaagctccgaaactactgatttactatacctcccgcctggagtctggagtcccttctcgcttctctggttctggttctgggacggattacactctgaccatcagcagtctgcaaccggaagacttcgcaacttattactgtcagcaaggtaatactctgccgtggacgttcggacagggcaccaaggtggagatcaaaggcggcggcggaagtggaggaggaggctcaggcggaggagggagcgaggttcagctggtggagtctggcggtggcctggtgcagccagggggctcactccgtttgtcctgtgcagcttctggctactcctttaccggctacactatgaactgggtgcgtcaggccccaggtaagggcctggaatgggttgcactgattaatccttataaaggtgttagtacctacaaccagaagttcaaggaccgtttcactataagcgtagataaatccaaaaacacagcctacctgcaaatgaacagcctgcgtgctgaggacactgccgtctattattgtgctagaagcggatactacggcgatagtgactggtattttgacgtgtggggtcaaggaaccctggtcaccgtctcctcgacatctggcggcggaggatctctggaatctggacaggtgctgctggaaagcaacatcaaggtgctgcccacctggtctaccccagttcagcctatggctctgattgtgcttggcggagttgccggcctgctgctctttatcggcctgggcatcttcttttgcgtgcggtgcagacatcggcggagacaggctgagagaatgagccagatcaagcggctgctgagcgagaagaaaacctgtcagtgccctcaccggttccagaaaacatgcagccccatc

SEQ ID NO: 671 - DNA, 1932 bp, Artificial Sequence
  Description of Artificial Sequence: Synthetic polynucleotide
atggctctgcctgtgacagctctgttgctgcctctggctctgctgctgcatgctgctagacctgaggtgcagctgttggagtctgggggaggcgtggtccagcctgggaggtccctgagactctcctgtgcagcctctggattcaccttcagtagctatggcatgcactgggtccgccaggctccaggcaaggggctggagtgggtggcagttatatcatatgatggaagtaataaatactatgcagactccgtgaagggccgattcaccatctccagagacaattccaagaacacgctgtatctgcaaatgaacagcctgagagctgaggacacggctgtgtattactgtgcgaaagatgccgcggatatgggggcctttgactactggggccagggaaccctggtcaccgtgtcctcagggtcaacctctggtagcggtaagcctggctccggcgaaggctccacaaagggtgacatccagatgacccagtctccagactccctggctgtgtctctgggcgagagggccaccatgaactgcaagtccagccagagtgttttatacagctccaacaataagaactacttagcttggtaccagcagaaaccaggacagcctcctaagctgctcatttactgggcatctgcccgggaatctggggtccctgaccgattcagtggcagcgggtctgggacagatttcactctcaccatcagcagcctgcaggctgaagatgtggcagtttattactgtcagcaatattatagtactcctctcacttttggccaggggaccaaggtggaaatcaaagagcagaaactgatcagcgaggaagatctgaatcctggcggaggcggaggaagtggtggcggaggttctggtggcggtggatcaggcggtggcggatctggatctatggatatccagatgacccagtccccgagctccctgtccgcctctgtgggcgatagggtcaccatcacctgccgtgccagtcaggacatccgtaattatctgaactggtatcaacagaaaccaggaaaagctccgaaactactgatttactatacctcccgcctggagtctggagtcccttctcgcttctctggttctggttctgggacggattacactctgaccatcagcagtctgcaaccggaagacttcgcaacttattactgtcagcaaggtaatactctgccgtggacgttcggacagggcaccaaggtggagatcaaaggcggcggcggaagtggaggaggaggctcaggcggaggagggagcgaggttcagctggtggagtctggcggtggcctggtgcagccagggggctcactccgtttgtcctgtgcagcttctggctactcctttaccggctacactatgaactgggtgcgtcaggccccaggtaagggcctggaatgggttgcactgattaatccttataaaggtgttagtacctacaaccagaagttcaaggaccgtttcactataagcgtagataaatccaaaaacacagcctacctgcaaatgaacagcctgcgtgctgaggacactgccgtctattattgtgctagaagcggatactacggcgatagtgactggtattttgacgtgtggggtcaaggaaccctggtcaccgtctcctcgacatctggcggcggaggatctctggaatctggacaggtgctgctggaaagcaacatcaaggtgctgcccacctggtctaccccagttcagcctatggctctgattgtgcttggcggagttgccggcctgctgctctttatcggcctgggcatcttcttttgcgtgcggtgcagacatcggcggagacaggctgagagaatgagccagatcaagcggctgctgagcgagaagaaaacctgtcagtgccctcaccggttccagaaaacatgcagccccatc

SEQ ID NO: 672 - DNA, 1932 bp, Artificial Sequence
  Description of Artificial Sequence: Synthetic polynucleotide
atggctctgcctgtgacagctctgttgctgcctctggctctgctgctgcatgctgctagacctgacatccagatgacccagtctccagactccctggctgtgtctctgggcgagagggccaccatgaactgcaagtccagccagagtgttttatacagctccaacaataagaactacttagcttggtaccagcagaaaccaggacagcctcctaagctgctcatttactgggcatctgcccgggaatctggggtccctgaccgattcagtggcagcgggtctgggacagatttcactctcaccatcagcagcctgcaggctgaagatgtggcagtttattactgtcagcaatattatagtactcctctcacttttggccaggggaccaaggtggaaatcaaagggtcaacctctggtagcggtaagcctggctccggcgaaggctccacaaagggtgaggtgcagctgttggagtctgggggaggcgtggtccagcctgggaggtccctgagactctcctgtgcagcctctggattcaccttcagtagctatggcatgcactgggtccgccaggctccaggcaaggggctggagtgggtggcagttatatcatatgatggaagtaataaatactatgcagactccgtgaagggccgattcaccatctccagagacaattccaagaacacgctgtatctgcaaatgaacagcctgagagctgaggacacggctgtgtattactgtgcgaaagatgccgcggatatgggggcctttgactactggggccagggaaccctggtcaccgtgtcctcagagcagaaactgatcagcgaggaagatctgaatcctggcggaggcggaggaagtggtggcggaggttctggtggcggtggatcaggcggtggcggatctggatctatggatatccagatgacccagtccccgagctccctgtccgcctctgtgggcgatagggtcaccatcacctgccgtgccagtcaggacatccgtaattatctgaactggtatcaacagaaaccaggaaaagctccgaaactactgatttactatacctcccgcctggagtctggagtcccttctcgcttctctggttctggttctgggacggattacactctgaccatcagcagtctgcaaccggaagacttcgcaacttattactgtcagcaaggtaatactctgccgtggacgttcggacagggcaccaaggtggagatcaaaggcggcggcggaagtggaggaggaggctcaggcggaggagggagcgaggttcagctggtggagtctggcggtggcctggtgcagccagggggctcactccgtttgtcctgtgcagcttctggctactcctttaccggctacactatgaactgggtgcgtcaggccccaggtaagggcctggaatgggttgcactgattaatccttataaaggtgttagtacctacaaccagaagttcaaggaccgtttcactataagcgtagataaatccaaaaacacagcctacctgcaaatgaacagcctgcgtgctgaggacactgccgtctattattgtgctagaagcggatactacggcgatagtgactggtattttgacgtgtggggtcaaggaaccctggtcaccgtctcctcgacatctggcggcggaggatctctggaatctggacaggtgctgctggaaagcaacatcaaggtgctgcccacctggtctaccccagttcagcctatggctctgattgtgcttggcggagttgccggcctgctgctctttatcggcctgggcatcttcttttgcgtgcggtgcagacatcggcggagacaggctgagagaatgagccagatcaagcggctgctgagcgagaagaaaacctgtcagtgccctcaccggttccagaaaacatgcagccccatc

SEQ ID NO: 673 - DNA, 1932 bp, Artificial Sequence
  Description of Artificial Sequence: Synthetic polynucleotide
atggctctgcctgtgacagctctgttgctgcctctggctctgctgctgcatgctgctagacctgaggtgcagctgttggagtctgggggaggcctggtcaagcctggggggtccctgagactctcctgtgcagcctctggattcaccttcagtagctatagcatgaactgggtccgccaggctccagggaaggggctggagtgggtctcagctattagtggtagtggtggtagcacatactacgcagactccgtgaagggccggttcaccatctccagagacaattccaagaacacgctgtatctgcaaatgaacagcctgagagccgaggacacggctgtgtattactgtgcgagagcacgtggatacagctatggctctgatgcttttgatatctggggccaagggacaatggtcaccgtgtcttcagggtcaacctctggtagcggtaagcctggctccggcgaaggctccacaaagggtcagtctgtgctgactcagccaccctcagcgtctgggacccccgggcagagggtcaccatctcttgttctggaagcagctccaacatcggaagtaattatgtatactggtaccagcagctcccaggaacggcccccaaactcctcatctataggaataatcagcggccctcaggggtccctgaccgattctctggctccaagtctggcacctcagcctccctggccatcagtgggctccggtccgaggatgaggctgattattactgtgcagcatgggatgacagcctgagtggcgtggtattcggcggagggaccaagctgaccgtcctagagcagaaactgatcagcgaggaagatctgaatcctggcggaggcggaggaagtggtggcggaggttctggtggcggtggatcaggcggtggcggatctggatctatggatatccagatgacccagtccccgagctccctgtccgcctctgtgggcgatagggtcaccatcacctgccgtgccagtcaggacatccgtaattatctgaactggtatcaacagaaaccaggaaaagctccgaaactactgatttactatacctcccgcctggagtctggagtcccttctcgcttctctggttctggttctgggacggattacactctgaccatcagcagtctgcaaccggaagacttcgcaacttattactgtcagcaaggtaatactctgccgtggacgttcggacagggcaccaaggtggagatcaaaggcggcggcggaagtggaggaggaggctcaggcggaggagggagcgaggttcagctggtggagtctggcggtggcctggtgcagccagggggctcactccgtttgtcctgtgcagcttctggctactcctttaccggctacactatgaactgggtgcgtcaggccccaggtaagggcctggaatgggttgcactgattaatccttataaaggtgttagtacctacaaccagaagttcaaggaccgtttcactataagcgtagataaatccaaaaacacagcctacctgcaaatgaacagcctgcgtgctgaggacactgccgtctattattgtgctagaagcggatactacggcgatagtgactggtattttgacgtgtggggtcaaggaaccctggtcaccgtctcctcgacatctggcggcggaggatctctggaatctggacaggtgctgctggaaagcaacatcaaggtgctgcccacctggtctaccccagttcagcctatggctctgattgtgcttggcggagttgccggcctgctgctctttatcggcctgggcatcttcttttgcgtgcggtgcagacatcggcggagacaggctgagagaatgagccagatcaagcggctgctgagcgagaagaaaacctgtcagtgccctcaccggttccagaaaacatgcagccccatc

SEQ ID NO: 674 - DNA, 1932 bp, Artificial Sequence
  Description of Artificial Sequence: Synthetic polynucleotide
atggctctgcctgtgacagctctgttgctgcctctggctctgctgctgcatgctgctagacctcagtctgtgctgactcagccaccctcagcgtctgggacccccgggcagagggtcaccatctcttgttctggaagcagctccaacatcggaagtaattatgtatactggtaccagcagctcccaggaacggcccccaaactcctcatctataggaataatcagcggccctcaggggtccctgaccgattctctggctccaagtctggcacctcagcctccctggccatcagtgggctccggtccgaggatgaggctgattattactgtgcagcatgggatgacagcctgagtggcgtggtattcggcggagggaccaagctgaccgtcctagggtcaacctctggtagcggtaagcctggctccggcgaaggctccacaaagggtgaggtgcagctgttggagtctgggggaggcctggtcaagcctggggggtccctgagactctcctgtgcagcctctggattcaccttcagtagctatagcatgaactgggtccgccaggctccagggaaggggctggagtgggtctcagctattagtggtagtggtggtagcacatactacgcagactccgtgaagggccggttcaccatctccagagacaattccaagaacacgctgtatctgcaaatgaacagcctgagagccgaggacacggctgtgtattactgtgcgagagcacgtggatacagctatggctctgatgcttttgatatctggggccaagggacaatggtcaccgtgtcttcagagcagaaactgatcagcgaggaagatctgaatcctggcggaggcggaggaagtggtggcggaggttctggtggcggtggatcaggcggtggcggatctggatctatggatatccagatgacccagtccccgagctccctgtccgcctctgtgggcgatagggtcaccatcacctgccgtgccagtcaggacatccgtaattatctgaactggtatcaacagaaaccaggaaaagctccgaaactactgatttactatacctcccgcctggagtctggagtcccttctcgcttctctggttctggttctgggacggattacactctgaccatcagcagtctgcaaccggaagacttcgcaacttattactgtcagcaaggtaatactctgccgtggacgttcggacagggcaccaaggtggagatcaaaggcggcggcggaagtggaggaggaggctcaggcggaggagggagcgaggttcagctggtggagtctggcggtggcctggtgcagccagggggctcactccgtttgtcctgtgcagcttctggctactcctttaccggctacactatgaactgggtgcgtcaggccccaggtaagggcctggaatgggttgcactgattaatccttataaaggtgttagtacctacaaccagaagttcaaggaccgtttcactataagcgtagataaatccaaaaacacagcctacctgcaaatgaacagcctgcgtgctgaggacactgccgtctattattgtgctagaagcggatactacggcgatagtgactggtattttgacgtgtggggtcaaggaaccctggtcaccgtctcctcgacatctggcggcggaggatctctggaatctggacaggtgctgctggaaagcaacatcaaggtgctgcccacctggtctaccccagttcagcctatggctctgattgtgcttggcggagttgccggcctgctgctctttatcggcctgggcatcttcttttgcgtgcggtgcagacatcggcggagacaggctgagagaatgagccagatcaagcggctgctgagcgagaagaaaacctgtcagtgccctcaccggttccagaaaacatgcagccccatc

SEQ ID NO: 675 - DNA, 1944 bp, Artificial Sequence
  Description of Artificial Sequence: Synthetic polynucleotide
atggctctgcctgtgacagctctgttgctgcctctggctctgctgctgcatgctgctagacctgaggtgcagctggtgcagtctggggctgaggtgaagaagcctgggtcctcggtgaaggtctcctgcaaggcttccggaggcaccttcagcagctatgctatcagctgggtgcgacaggcccctggacaagggcttgagtggatgggagggatcatccctatctttggtacagcaaactacgcacagaagttccagggcagagtcacgattaccgcggacgaatccacgagcacagcctacatggagctgagcagcctgaggagcgaggacacggccgtgtattactgtgcgagagatcgggggagaagatattgtagtggtggtagctgccctaatgcttttgatatctggggccaagggacaatggtcaccgtgtcttcagggtcaacctctggtagcggtaagcctggctccggcgaaggctccacaaagggtgaaattgtgttgacacagtctccagccaccctgtctgtgtctccaggggaaagagccaccctctcctgcagggccagtcagagtgttagcagcaacttagcctggtaccagcagaaacctggccaggctcccaggctcctcatctatggtgcatccaccagggccactggtatcccagccaggttcagtggcagtgggtctgggacagagttcactctcaccatcagcagcctgcagtctgaagattttgcagtttattactgtcagcagtataataactggcccccggccctcactttcggcggagggaccaaggtggaaatcaaagagcagaaactgatcagcgaggaagatctgaatcctggcggaggcggaggaagtggtggcggaggttctggtggcggtggatcaggcggtggcggatctggatctatggatatccagatgacccagtccccgagctccctgtccgcctctgtgggcgatagggtcaccatcacctgccgtgccagtcaggacatccgtaattatctgaactggtatcaacagaaaccaggaaaagctccgaaactactgatttactatacctcccgcctggagtctggagtcccttctcgcttctctggttctggttctgggacggattacactctgaccatcagcagtctgcaaccggaagacttcgcaacttattactgtcagcaaggtaatactctgccgtggacgttcggacagggcaccaaggtggagatcaaaggcggcggcggaagtggaggaggaggctcaggcggaggagggagcgaggttcagctggtggagtctggcggtggcctggtgcagccagggggctcactccgtttgtcctgtgcagcttctggctactcctttaccggctacactatgaactgggtgcgtcaggccccaggtaagggcctggaatgggttgcactgattaatccttataaaggtgttagtacctacaaccagaagttcaaggaccgtttcactataagcgtagataaatccaaaaacacagcctacctgcaaatgaacagcctgcgtgctgaggacactgccgtctattattgtgctagaagcggatactacggcgatagtgactggtattttgacgtgtggggtcaaggaaccctggtcaccgtctcctcgacatctggcggcggaggatctctggaatctggacaggtgctgctggaaagcaacatcaaggtgctgcccacctggtctaccccagttcagcctatggctctgattgtgcttggcggagttgccggcctgctgctctttatcggcctgggcatcttcttttgcgtgcggtgcagacatcggcggagacaggctgagagaatgagccagatcaagcggctgctgagcgagaagaaaacctgtcagtgccctcaccggttccagaaaacatgcagccccatc

SEQ ID NO: 676 - DNA, 1944 bp, Artificial Sequence
  Description of Artificial Sequence: Synthetic polynucleotide
atggctctgcctgtgacagctctgttgctgcctctggctctgctgctgcatgctgctagacctgaaattgtgttgacacagtctccagccaccctgtctgtgtctccaggggaaagagccaccctctcctgcagggccagtcagagtgttagcagcaacttagcctggtaccagcagaaacctggccaggctcccaggctcctcatctatggtgcatccaccagggccactggtatcccagccaggttcagtggcagtgggtctgggacagagttcactctcaccatcagcagcctgcagtctgaagattttgcagtttattactgtcagcagtataataactggcccccggccctcactttcggcggagggaccaaggtggaaatcaaagggtcaacctctggtagcggtaagcctggctccggcgaaggctccacaaagggtgaggtgcagctggtgcagtctggggctgaggtgaagaagcctgggtcctcggtgaaggtctcctgcaaggcttccggaggcaccttcagcagctatgctatcagctgggtgcgacaggcccctggacaagggcttgagtggatgggagggatcatccctatctttggtacagcaaactacgcacagaagttccagggcagagtcacgattaccgcggacgaatccacgagcacagcctacatggagctgagcagcctgaggagcgaggacacggccgtgtattactgtgcgagagatcgggggagaagatattgtagtggtggtagctgccctaatgcttttgatatctggggccaagggacaatggtcaccgtgtcttcagagcagaaactgatcagcgaggaagatctgaatcctggcggaggcggaggaagtggtggcggaggttctggtggcggtggatcaggcggtggcggatctggatctatggatatccagatgacccagtccccgagctccctgtccgcctctgtgggcgatagggtcaccatcacctgccgtgccagtcaggacatccgtaattatctgaactggtatcaacagaaaccaggaaaagctccgaaactactgatttactatacctcccgcctggagtctggagtcccttctcgcttctctggttctggttctgggacggattacactctgaccatcagcagtctgcaaccggaagacttcgcaacttattactgtcagcaaggtaatactctgccgtggacgttcggacagggcaccaaggtggagatcaaaggcggcggcggaagtggaggaggaggctcaggcggaggagggagcgaggttcagctggtggagtctggcggtggcctggtgcagccagggggctcactccgtttgtcctgtgcagcttctggctactcctttaccggctacactatgaactgggtgcgtcaggccccaggtaagggcctggaatgggttgcactgattaatccttataaaggtgttagtacctacaaccagaagttcaaggaccgtttcactataagcgtagataaatccaaaaacacagcctacctgcaaatgaacagcctgcgtgctgaggacactgccgtctattattgtgctagaagcggatactacggcgatagtgactggtattttgacgtgtggggtcaaggaaccctggtcaccgtctcctcgacatctggcggcggaggatctctggaatctggacaggtgctgctggaaagcaacatcaaggtgctgcccacctggtctaccccagttcagcctatggctctgattgtgcttggcggagttgccggcctgctgctctttatcggcctgggcatcttcttttgcgtgcggtgcagacatcggcggagacaggctgagagaatgagccagatcaagcggctgctgagcgagaagaaaacctgtcagtgccctcaccggttccagaaaacatgcagccccatc

SEQ ID NO: 677 - DNA, 1944 bp, Artificial Sequence
  Description of Artificial Sequence: Synthetic polynucleotide
atggctctgcctgtgacagctctgttgctgcctctggctctgctgctgcatgctgctagacctcaggttcagctggtgcagtctggggctgaggtgaagaagcctgggtcctcggtgaaggtctcctgcaaggcttctggaggcaccttcagcagctatgctatcagctgggtgcgacaggcccctggacaagggcttgagtggatgggagggatcatccctatctttggtacagcaaactacgcacagaagttccagggcagagtcacgattaccgcggacgaatccacgagcacagcctacatggagctgagcagcctgaggagcgaggacacggccgtgtattactgtgcgagagggggttacgtttgggggagttatcgtcagaactccaactggttcgacccctggggccagggaaccctggtcaccgtgtcctcagggtcaacctctggtagcggtaagcctggctccggcgaaggctccacaaagggttcctatgtgctgactcagccaccctcagcgtctgggacccccgggcagagggtcaccatctcttgttctggaagcagctccaacatcggaagtaattatgtatactggtaccagcagctcccaggaacggcccccaaactcctcatctataggaataatcagcggccctcaggggtccctgaccgattctctggctccaagtctggcacctcagcctccctggccatcagtgggctccggtccgaggatgaggctgattattactgtgcagcatgggatgacagcctgagtggttgggtgttcggcggagggaccaagctgaccgtcctagagcagaaactgatcagcgaggaagatctgaatcctggcggaggcggaggaagtggtggcggaggttctggtggcggtggatcaggcggtggcggatctggatctatggatatccagatgacccagtccccgagctccctgtccgcctctgtgggcgatagggtcaccatcacctgccgtgccagtcaggacatccgtaattatctgaactggtatcaacagaaaccaggaaaagctccgaaactactgatttactatacctcccgcctggagtctggagtcccttctcgcttctctggttctggttctgggacggattacactctgaccatcagcagtctgcaaccggaagacttcgcaacttattactgtcagcaaggtaatactctgccgtggacgttcggacagggcaccaaggtggagatcaaaggcggcggcggaagtggaggaggaggctcaggcggaggagggagcgaggttcagctggtggagtctggcggtggcctggtgcagccagggggctcactccgtttgtcctgtgcagcttctggctactcctttaccggctacactatgaactgggtgcgtcaggccccaggtaagggcctggaatgggttgcactgattaatccttataaaggtgttagtacctacaaccagaagttcaaggaccgtttcactataagcgtagataaatccaaaaacacagcctacctgcaaatgaacagcctgcgtgctgaggacactgccgtctattattgtgctagaagcggatactacggcgatagtgactggtattttgacgtgtggggtcaaggaaccctggtcaccgtctcctcgacatctggcggcggaggatctctggaatctggacaggtgctgctggaaagcaacatcaaggtgctgcccacctggtctaccccagttcagcctatggctctgattgtgcttggcggagttgccggcctgctgctctttatcggcctgggcatcttcttttgcgtgcggtgcagacatcggcggagacaggctgagagaatgagccagatcaagcggctgctgagcgagaagaaaacctgtcagtgccctcaccggttccagaaaacatgcagccccatc

SEQ ID NO: 678 - DNA, 1944 bp, Artificial Sequence
  Description of Artificial Sequence: Synthetic polynucleotide
atggctctgcctgtgacagctctgttgctgcctctggctctgctgctgcatgctgctagaccttcctatgtgctgactcagccaccctcagcgtctgggacccccgggcagagggtcaccatctcttgttctggaagcagctccaacatcggaagtaattatgtatactggtaccagcagctcccaggaacggcccccaaactcctcatctataggaataatcagcggccctcaggggtccctgaccgattctctggctccaagtctggcacctcagcctccctggccatcagtgggctccggtccgaggatgaggctgattattactgtgcagcatgggatgacagcctgagtggttgggtgttcggcggagggaccaagctgaccgtcctagggtcaacctctggtagcggtaagcctggctccggcgaaggctccacaaagggtcaggttcagctggtgcagtctggggctgaggtgaagaagcctgggtcctcggtgaaggtctcctgcaaggcttctggaggcaccttcagcagctatgctatcagctgggtgcgacaggcccctggacaagggcttgagtggatgggagggatcatccctatctttggtacagcaaactacgcacagaagttccagggcagagtcacgattaccgcggacgaatccacgagcacagcctacatggagctgagcagcctgaggagcgaggacacggccgtgtattactgtgcgagagggggttacgtttgggggagttatcgtcagaactccaactggttcgacccctggggccagggaaccctggtcaccgtgtcctcagagcagaaactgatcagcgaggaagatctgaatcctggcggaggcggaggaagtggtggcggaggttctggtggcggtggatcaggcggtggcggatctggatctatggatatccagatgacccagtccccgagctccctgtccgcctctgtgggcgatagggtcaccatcacctgccgtgccagtcaggacatccgtaattatctgaactggtatcaacagaaaccaggaaaagctccgaaactactgatttactatacctcccgcctggagtctggagtcccttctcgcttctctggttctggttctgggacggattacactctgaccatcagcagtctgcaaccggaagacttcgcaacttattactgtcagcaaggtaatactctgccgtggacgttcggacagggcaccaaggtggagatcaaaggcggcggcggaagtggaggaggaggctcaggcggaggagggagcgaggttcagctggtggagtctggcggtggcctggtgcagccagggggctcactccgtttgtcctgtgcagcttctggctactcctttaccggctacactatgaactgggtgcgtcaggccccaggtaagggcctggaatgggttgcactgattaatccttataaaggtgttagtacctacaaccagaagttcaaggaccgtttcactataagcgtagataaatccaaaaacacagcctacctgcaaatgaacagcctgcgtgctgaggacactgccgtctattattgtgctagaagcggatactacggcgatagtgactggtattttgacgtgtggggtcaaggaaccctggtcaccgtctcctcgacatctggcggcggaggatctctggaatctggacaggtgctgctggaaagcaacatcaaggtgctgcccacctggtctaccccagttcagcctatggctctgattgtgcttggcggagttgccggcctgctgctctttatcggcctgggcatcttcttttgcgtgcggtgcagacatcggcggagacaggctgagagaatgagccagatcaagcggctgctgagcgagaagaaaacctgtcagtgccctcaccggttccagaaaacatgcagccccatc

SEQ ID NO: 679 - DNA, 1941 bp, Artificial Sequence
  Description of Artificial Sequence: Synthetic polynucleotide
atggctctgcctgtgacagctctgttgctgcctctggctctgctgctgcatgctgctagacctcaggtgcagctggtggagtctggggctgaggtgaagaagcctgggtcctcggtgaaggtctcctgcaaggcttctggaggcaccttcagcagctatgctatcagctgggtgcgacaggcccctggacaagggcttgagtggatgggagggatcatccctatctttggtacagcaaactacgcacagaagttccagggcagagtcacgattaccgcggacaaatccacgagcacagcctacatggagctgagcagcctgaggagcgaggacacggccgtgtattactgtgcgaggacccatctaccatacagctatggtttaggcgggtttgactactggggccagggaaccctggtcaccgtgtcctcagggtcaacctctggtagcggtaagcctggctccggcgaaggctccacaaagggtcagtctgtgctgacgcagccgccctcagtgtctggggccccagggcagagggtcaccatctcctgcactgggagcagctccaacatcggggcaggttatgatgtacactggtaccagcagcttccaggaacagcccccaaactcctcatctatggtaacagcaatcggccctcaggggtccctgaccgattctctggctccaagtctggcacctcagcctccctggccatcactgggctccaggctgaggatgaggctgattattactgccagtcctatgacagcagcctgagtggcccggtggtattcggcggagggaccaaggtcaccgtcctagagcagaaactgatcagcgaggaagatctgaatcctggcggaggcggaggaagtggtggcggaggttctggtggcggtggatcaggcggtggcggatctggatctatggatatccagatgacccagtccccgagctccctgtccgcctctgtgggcgatagggtcaccatcacctgccgtgccagtcaggacatccgtaattatctgaactggtatcaacagaaaccaggaaaagctccgaaactactgatttactatacctcccgcctggagtctggagtcccttctcgcttctctggttctggttctgggacggattacactctgaccatcagcagtctgcaaccggaagacttcgcaacttattactgtcagcaaggtaatactctgccgtggacgttcggacagggcaccaaggtggagatcaaaggcggcggcggaagtggaggaggaggctcaggcggaggagggagcgaggttcagctggtggagtctggcggtggcctggtgcagccagggggctcactccgtttgtcctgtgcagcttctggctactcctttaccggctacactatgaactgggtgcgtcaggccccaggtaagggcctggaatgggttgcactgattaatccttataaaggtgttagtacctacaaccagaagttcaaggaccgtttcactataagcgtagataaatccaaaaacacagcctacctgcaaatgaacagcctgcgtgctgaggacactgccgtctattattgtgctagaagcggatactacggcgatagtgactggtattttgacgtgtggggtcaaggaaccctggtcaccgtctcctcgacatctggcggcggaggatctctggaatctggacaggtgctgctggaaagcaacatcaaggtgctgcccacctggtctaccccagttcagcctatggctctgattgtgcttggcggagttgccggcctgctgctctttatcggcctgggcatcttcttttgcgtgcggtgcagacatcggcggagacaggctgagagaatgagccagatcaagcggctgctgagcgagaagaaaacctgtcagtgccctcaccggttccagaaaacatgcagccccatc

SEQ ID NO: 680 - DNA, 1941 bp, Artificial Sequence
  Description of Artificial Sequence: Synthetic polynucleotide
atggctctgcctgtgacagctctgttgctgcctctggctctgctgctgcatgctgctagacctcagtctgtgctgacgcagccgccctcagtgtctggggccccagggcagagggtcaccatctcctgcactgggagcagctccaacatcggggcaggttatgatgtacactggtaccagcagcttccaggaacagcccccaaactcctcatctatggtaacagcaatcggccctcaggggtccctgaccgattctctggctccaagtctggcacctcagcctccctggccatcactgggctccaggctgaggatgaggctgattattactgccagtcctatgacagcagcctgagtggcccggtggtattcggcggagggaccaaggtcaccgtcctagggtcaacctctggtagcggtaagcctggctccggcgaaggctccacaaagggtcaggtgcagctggtggagtctggggctgaggtgaagaagcctgggtcctcggtgaaggtctcctgcaaggcttctggaggcaccttcagcagctatgctatcagctgggtgcgacaggcccctggacaagggcttgagtggatgggagggatcatccctatctttggtacagcaaactacgcacagaagttccagggcagagtcacgattaccgcggacaaatccacgagcacagcctacatggagctgagcagcctgaggagcgaggacacggccgtgtattactgtgcgaggacccatctaccatacagctatggtttaggcgggtttgactactggggccagggaaccctggtcaccgtgtcctcagagcagaaactgatcagcgaggaagatctgaatcctggcggaggcggaggaagtggtggcggaggttctggtggcggtggatcaggcggtggcggatctggatctatggatatccagatgacccagtccccgagctccctgtccgcctctgtgggcgatagggtcaccatcacctgccgtgccagtcaggacatccgtaattatctgaactggtatcaacagaaaccaggaaaagctccgaaactactgatttactatacctcccgcctggagtctggagtcccttctcgcttctctggttctggttctgggacggattacactctgaccatcagcagtctgcaaccggaagacttcgcaacttattactgtcagcaaggtaatactctgccgtggacgttcggacagggcaccaaggtggagatcaaaggcggcggcggaagtggaggaggaggctcaggcggaggagggagcgaggttcagctggtggagtctggcggtggcctggtgcagccagggggctcactccgtttgtcctgtgcagcttctggctactcctttaccggctacactatgaactgggtgcgtcaggccccaggtaagggcctggaatgggttgcactgattaatccttataaaggtgttagtacctacaaccagaagttcaaggaccgtttcactataagcgtagataaatccaaaaacacagcctacctgcaaatgaacagcctgcgtgctgaggacactgccgtctattattgtgctagaagcggatactacggcgatagtgactggtattttgacgtgtggggtcaaggaaccctggtcaccgtctcctcgacatctggcggcggaggatctctggaatctggacaggtgctgctggaaagcaacatcaaggtgctgcccacctggtctaccccagttcagcctatggctctgattgtgcttggcggagttgccggcctgctgctctttatcggcctgggcatcttcttttgcgtgcggtgcagacatcggcggagacaggctgagagaatgagccagatcaagcggctgctgagcgagaagaaaacctgtcagtgccctcaccggttccagaaaacatgcagccccatc

SEQ ID NO: 681 - DNA, 1947 bp, Artificial Sequence
  Description of Artificial Sequence: Synthetic polynucleotide
atggctctgcctgtgacagctctgttgctgcctctggctctgctgctgcatgctgctagacctcaggtgcagctggtgcagtctggggctgaggtgaagaagcctggggcctcagtgaaggtctcctgcaaggcttctggttacacctttaccagctatggtatcagctgggtgcgacaggcccctggacaagggcttgagtggatgggatggatcagcgcttacaatggtaacacaaactatgcacagaagctccagggcagagtcaccatgaccacagacacatccacgagcacagcctacatggagctgaggagcctgaggagcgacgacacggccgtgtattactgtgcgagagatataatacgatattgtagtagtaccagctgctatagagggattgactactggggccagggaaccctggtcaccgtgtcctcagggtcaacctctggtagcggtaagcctggctccggcgaaggctccacaaagggtcagtctgccctgactcagcctgcctccgtgtctgggtctcctggacagtcgatcaccatctcctgcactggaaccagcagtgacgttggtggttataactatgtctcctggtaccaacagcacccaggcaaagcccccaaactcatgatttatgatgtcagtaatcggccctcaggggtttctaatcgcttctctggctccaagtctggcaacacggcctccctgaccatctctgggctccaggctgaggacgaggctgattattactgcagctcatatacaagcagcagcccccatgtggtatccggcggagggaccaagctgacggtcctagagcagaaactgatcagcgaggaagatctgaatcctggcggaggcggaggaagtggtggcggaggttctggtggcggtggatcaggcggtggcggatctggatctatggatatccagatgacccagtccccgagctccctgtccgcctctgtgggcgatagggtcaccatcacctgccgtgccagtcaggacatccgtaattatctgaactggtatcaacagaaaccaggaaaagctccgaaactactgatttactatacctcccgcctggagtctggagtcccttctcgcttctctggttctggttctgggacggattacactctgaccatcagcagtctgcaaccggaagacttcgcaacttattactgtcagcaaggtaatactctgccgtggacgttcggacagggcaccaaggtggagatcaaaggcggcggcggaagtggaggaggaggctcaggcggaggagggagcgaggttcagctggtggagtctggcggtggcctggtgcagccagggggctcactccgtttgtcctgtgcagcttctggctactcctttaccggctacactatgaactgggtgcgtcaggccccaggtaagggcctggaatgggttgcactgattaatccttataaaggtgttagtacctacaaccagaagttcaaggaccgtttcactataagcgtagataaatccaaaaacacagcctacctgcaaatgaacagcctgcgtgctgaggacactgccgtctattattgtgctagaagcggatactacggcgatagtgactggtattttgacgtgtggggtcaaggaaccctggtcaccgtctcctcgacatctggcggcggaggatctctggaatctggacaggtgctgctggaaagcaacatcaaggtgctgcccacctggtctaccccagttcagcctatggctctgattgtgcttggcggagttgccggcctgctgctctttatcggcctgggcatcttcttttgcgtgcggtgcagacatcggcggagacaggctgagagaatgagccagatcaagcggctgctgagcgagaagaaaacctgtcagtgccctcaccggttccagaaaacatgcagccccatc

SEQ ID NO: 682 - DNA, 1947 bp, Artificial Sequence
  Description of Artificial Sequence: Synthetic polynucleotide
atggctctgcctgtgacagctctgttgctgcctctggctctgctgctgcatgctgctagacctcagtctgccctgactcagcctgcctccgtgtctgggtctcctggacagtcgatcaccatctcctgcactggaaccagcagtgacgttggtggttataactatgtctcctggtaccaacagcacccaggcaaagcccccaaactcatgatttatgatgtcagtaatcggccctcaggggtttctaatcgcttctctggctccaagtctggcaacacggcctccctgaccatctctgggctccaggctgaggacgaggctgattattactgcagctcatatacaagcagcagcccccatgtggtatccggcggagggaccaagctgacggtcctagggtcaacctctggtagcggtaagcctggctccggcgaaggctccacaaagggtcaggtgcagctggtgcagtctggggctgaggtgaagaagcctggggcctcagtgaaggtctcctgcaaggcttctggttacacctttaccagctatggtatcagctgggtgcgacaggcccctggacaagggcttgagtggatgggatggatcagcgcttacaatggtaacacaaactatgcacagaagctccagggcagagtcaccatgaccacagacacatccacgagcacagcctacatggagctgaggagcctgaggagcgacgacacggccgtgtattactgtgcgagagatataatacgatattgtagtagtaccagctgctatagagggattgactactggggccagggaaccctggtcaccgtgtcctcagagcagaaactgatcagcgaggaagatctgaatcctggcggaggcggaggaagtggtggcggaggttctggtggcggtggatcaggcggtggcggatctggatctatggatatccagatgacccagtccccgagctccctgtccgcctctgtgggcgatagggtcaccatcacctgccgtgccagtcaggacatccgtaattatctgaactggtatcaacagaaaccaggaaaagctccgaaactactgatttactatacctcccgcctggagtctggagtcccttctcgcttctctggttctggttctgggacggattacactctgaccatcagcagtctgcaaccggaagacttcgcaacttattactgtcagcaaggtaatactctgccgtggacgttcggacagggcaccaaggtggagatcaaaggcggcggcggaagtggaggaggaggctcaggcggaggagggagcgaggttcagctggtggagtctggcggtggcctggtgcagccagggggctcactccgtttgtcctgtgcagcttctggctactcctttaccggctacactatgaactgggtgcgtcaggccccaggtaagggcctggaatgggttgcactgattaatccttataaaggtgttagtacctacaaccagaagttcaaggaccgtttcactataagcgtagataaatccaaaaacacagcctacctgcaaatgaacagcctgcgtgctgaggacactgccgtctattattgtgctagaagcggatactacggcgatagtgactggtattttgacgtgtggggtcaaggaaccctggtcaccgtctcctcgacatctggcggcggaggatctctggaatctggacaggtgctgctggaaagcaacatcaaggtgctgcccacctggtctaccccagttcagcctatggctctgattgtgcttggcggagttgccggcctgctgctctttatcggcctgggcatcttcttttgcgtgcggtgcagacatcggcggagacaggctgagagaatgagccagatcaagcggctgctgagcgagaagaaaacctgtcagtgccctcaccggttccagaaaacatgcagccccatc

SEQ ID NO: 683 - DNA, 1932 bp, Artificial Sequence
  Description of Artificial Sequence: Synthetic polynucleotide
atggctctgcctgtgacagctctgttgctgcctctggctctgctgctgcatgctgctagacctcaggtgcagctggtggagtctggggctgaggtgaagaagcctgggtcctcggtgaaggtctcctgcaaggcttctggaggcaccttcagcagctatgctatcagctgggtgcgacaggcccctggacaagggcttgagtggatgggagggatcatccctatctttggtacagcaaactacgcacagaagttccagggcagagtcacgattaccgcggacgaatccacgagcacagcctacatggagctgagcagcctgaggagcgaggacacggccgtgtattactgtgcgcgccccctgtatgcccctcgcttcggatacggtatggacgtctggggccaagggaccctggtcaccgtgtcctcagggtcaacctctggtagcggtaagcctggctccggcgaaggctccacaaagggtcagtctgtgttgacgcagccgccctcagcgtctgggacccccgggcagagggtcaccatctcttgttctggaagcagctccaacatcggaagtaattatgtatactggtaccagcagctcccaggaacggcccccaaactcctcatctataggaataatcagcggccctcaggggtccctgaccgattctctggctccaagtctggcacctcagcctccctggccatcagtgggctccggtccgaggatgaggctgattattactgtgcagcatgggatgacagcctgagtggttgggtgttcggcggaggcacccagctgaccgtcctcgagcagaaactgatcagcgaggaagatctgaatcctggcggaggcggaggaagtggtggcggaggttctggtggcggtggatcaggcggtggcggatctggatctatggatatccagatgacccagtccccgagctccctgtccgcctctgtgggcgatagggtcaccatcacctgccgtgccagtcaggacatccgtaattatctgaactggtatcaacagaaaccaggaaaagctccgaaactactgatttactatacctcccgcctggagtctggagtcccttctcgcttctctggttctggttctgggacggattacactctgaccatcagcagtctgcaaccggaagacttcgcaacttattactgtcagcaaggtaatactctgccgtggacgttcggacagggcaccaaggtggagatcaaaggcggcggcggaagtggaggaggaggctcaggcggaggagggagcgaggttcagctggtggagtctggcggtggcctggtgcagccagggggctcactccgtttgtcctgtgcagcttctggctactcctttaccggctacactatgaactgggtgcgtcaggccccaggtaagggcctggaatgggttgcactgattaatccttataaaggtgttagtacctacaaccagaagttcaaggaccgtttcactataagcgtagataaatccaaaaacacagcctacctgcaaatgaacagcctgcgtgctgaggacactgccgtctattattgtgctagaagcggatactacggcgatagtgactggtattttgacgtgtggggtcaaggaaccctggtcaccgtctcctcgacatctggcggcggaggatctctggaatctggacaggtgctgctggaaagcaacatcaaggtgctgcccacctggtctaccccagttcagcctatggctctgattgtgcttggcggagttgccggcctgctgctctttatcggcctgggcatcttcttttgcgtgcggtgcagacatcggcggagacaggctgagagaatgagccagatcaagcggctgctgagcgagaagaaaacctgtcagtgccctcaccggttccagaaaacatgcagccccatc

SEQ ID NO: 684 - DNA, 1932 bp, Artificial Sequence
  Description of Artificial Sequence: Synthetic polynucleotide
atggctctgcctgtgacagctctgttgctgcctctggctctgctgctgcatgctgctagacctcagtctgtgttgacgcagccgccctcagcgtctgggacccccgggcagagggtcaccatctcttgttctggaagcagctccaacatcggaagtaattatgtatactggtaccagcagctcccaggaacggcccccaaactcctcatctataggaataatcagcggccctcaggggtccctgaccgattctctggctccaagtctggcacctcagcctccctggccatcagtgggctccggtccgaggatgaggctgattattactgtgcagcatgggatgacagcctgagtggttgggtgttcggcggaggcacccagctgaccgtcctcgggtcaacctctggtagcggtaagcctggctccggcgaaggctccacaaagggtcaggtgcagctggtggagtctggggctgaggtgaagaagcctgggtcctcggtgaaggtctcctgcaaggcttctggaggcaccttcagcagctatgctatcagctgggtgcgacaggcccctggacaagggcttgagtggatgggagggatcatccctatctttggtacagcaaactacgcacagaagttccagggcagagtcacgattaccgcggacgaatccacgagcacagcctacatggagctgagcagcctgaggagcgaggacacggccgtgtattactgtgcgcgccccctgtatgcccctcgcttcggatacggtatggacgtctggggccaagggaccctggtcaccgtgtcctcagagcagaaactgatcagcgaggaagatctgaatcctggcggaggcggaggaagtggtggcggaggttctggtggcggtggatcaggcggtggcggatctggatctatggatatccagatgacccagtccccgagctccctgtccgcctctgtgggcgatagggtcaccatcacctgccgtgccagtcaggacatccgtaattatctgaactggtatcaacagaaaccaggaaaagctccgaaactactgatttactatacctcccgcctggagtctggagtcccttctcgcttctctggttctggttctgggacggattacactctgaccatcagcagtctgcaaccggaagacttcgcaacttattactgtcagcaaggtaatactctgccgtggacgttcggacagggcaccaaggtggagatcaaaggcggcggcggaagtggaggaggaggctcaggcggaggagggagcgaggttcagctggtggagtctggcggtggcctggtgcagccagggggctcactccgtttgtcctgtgcagcttctggctactcctttaccggctacactatgaactgggtgcgtcaggccccaggtaagggcctggaatgggttgcactgattaatccttataaaggtgttagtacctacaaccagaagttcaaggaccgtttcactataagcgtagataaatccaaaaacacagcctacctgcaaatgaacagcctgcgtgctgaggacactgccgtctattattgtgctagaagcggatactacggcgatagtgactggtattttgacgtgtggggtcaaggaaccctggtcaccgtctcctcgacatctggcggcggaggatctctggaatctggacaggtgctgctggaaagcaacatcaaggtgctgcccacctggtctaccccagttcagcctatggctctgattgtgcttggcggagttgccggcctgctgctctttatcggcctgggcatcttcttttgcgtgcggtgcagacatcggcggagacaggctgagagaatgagccagatcaagcggctgctgagcgagaagaaaacctgtcagtgccctcaccggttccagaaaacatgcagccccatc

SEQ ID NO: 685 - DNA, 1542 bp, Artificial Sequence
  Description of Artificial Sequence: Synthetic polynucleotide
atggctctgcctgtgacagctctgttgctgcctctggctctgctgctgcatgctgctagacctcaggtgcagctgcaggagagcggcggcggcctggtgcagcccggcggcagcctgaggctgagctgcgccgccagcggcatcatcttcagcatcaacaccatggcctggtacaggcagggccccggcaagcagagggacctggtggccctgatcagcagcggcggcaacaccagctacgccgacagcgtgaacggcaggttcaccatcagcagggacaacgccaagaacaccgtgtacctgcagatgaacggcctgaagcccgaggacaccgccgtgtactactgcaacagcgccggcaggagctacagcggcagctacggcgcctactggggccagggcacccaggtgaccgtgagcagcgagcagaaactgatcagcgaggaagatctgaatcctggcggaggcggaggaagtggtggcggaggttctggtggcggtggatcaggcggtggcggatctggatctatggatatccagatgacccagtccccgagctccctgtccgcctctgtgggcgatagggtcaccatcacctgccgtgccagtcaggacatccgtaattatctgaactggtatcaacagaaaccaggaaaagctccgaaactactgatttactatacctcccgcctggagtctggagtcccttctcgcttctctggttctggttctgggacggattacactctgaccatcagcagtctgcaaccggaagacttcgcaacttattactgtcagcaaggtaatactctgccgtggacgttcggacagggcaccaaggtggagatcaaaggcggcggcggaagtggaggaggaggctcaggcggaggagggagcgaggttcagctggtggagtctggcggtggcctggtgcagccagggggctcactccgtttgtcctgtgcagcttctggctactcctttaccggctacactatgaactgggtgcgtcaggccccaggtaagggcctggaatgggttgcactgattaatccttataaaggtgttagtacctacaaccagaagttcaaggaccgtttcactataagcgtagataaatccaaaaacacagcctacctgcaaatgaacagcctgcgtgctgaggacactgccgtctattattgtgctagaagcggatactacggcgatagtgactggtattttgacgtgtggggtcaaggaaccctggtcaccgtctcctcgacatctggcggcggaggatctctggaatctggacaggtgctgctggaaagcaacatcaaggtgctgcccacctggtctaccccagttcagcctatggctctgattgtgcttggcggagttgccggcctgctgctctttatcggcctgggcatcttcttttgcgtgcggtgcagacatcggcggagacaggctgagagaatgagccagatcaagcggctgctgagcgagaagaaaacctgtcagtgccctcaccggttccagaaaacatgcagccccatc

SEQ ID NO: 686 - protein, 514 aa, Artificial Sequence
  Description of Artificial Sequence: Synthetic polypeptide
MALPVTALLLPLALLLHAARPQVQLQESGGGLVQPGGSLRLSCAASGIIFSINTMAWYRQGPGKQRDLVALISSGGNTSYADSVNGRFTISRDNAKNTVYLQMNGLKPEDTAVYYCNSAGRSYSGSYGAYWGQGTQVTVSSEQKLISEEDLNPGGGGGSGGGGSGGGGSGGGGSGSMDIQMTQSPSSLSASVGDRVTITCRASQDIRNYLNWYQQKPGKAPKLLIYYTSRLESGVPSRFSGSGSGTDYTLTISSLQPEDFATYYCQQGNTLPWTFGQGTKVEIKGGGGSGGGGSGGGGSEVQLVESGGGLVQPGGSLRLSCAASGYSFTGYTMNWVRQAPGKGLEWVALINPYKGVSTYNQKFKDRFTISVDKSKNTAYLQMNSLRAEDTAVYYCARSGYYGDSDWYFDVWGQGTLVTVSSTSGGGGSLESGQVLLESNIKVLPTWSTPVQPMALIVLGGVAGLLLFIGLGIFFCVRCRHRRRQAERMSQIKRLLSEKKTCQCPHRFQKTCSPI
